(19) United States
(12) Patent Application Publication
(10) Pub. No.: US 2025/0129422 A1
(43) Pub. Date: Apr. 24, 2025

(54) DIAGNOSIS AND TREATMENT OF DISEASES AND CONDITIONS OF THE INTESTINAL TRACT

(71) Applicant: Flagship Pioneering Innovations VI, LLC, Cambridge, MA (US)

(72) Inventors: Douglas Gowers COLE, Wayland, MA (US); Jason PARK, West Newton, MA (US); Sabrina Yusang YANG, Cambridge, MA (US); Boris HAYETE, Needham, MA (US); Andrew John GASPARRINI, Boston, MA (US)

(21) Appl. No.: 18/694,569

(22) PCT Filed: Sep. 23, 2022
(86) PCT No.: PCT/US2022/076928

§ 371 Date: Mar. 22, 2024

Related U.S. Application Data
(60) Provisional application No. 63/247,499, filed on Sep. 23, 2021.

(51) Int. Cl. C12Q 1/6883

(52) U.S. Cl. CPC C12Q 1/6883; C12Q 2600/106; C12Q 2600/118; C12Q 2600/158

(57) ABSTRACT

The invention relates to methods of monitoring treatment response, disease resolution, and disease progression in subjects having inflammatory bowel disease (IBD).

### SEQUENCE LISTING

[0001] The instant application contains a Sequence Listing which has been submitted electronically in XML file format and is hereby incorporated by reference in its entirety. Said XML copy, created on Sep. 12, 2022, is named 51373-019WO1_Sequence_Listing_9_12_22.xml and is 2,275,135 bytes in size.

### FIELD OF THE INVENTION

[0002] The invention relates to methods of monitoring treatment response, disease resolution, and disease progression in subjects having inflammatory bowel disease (IBD).

### BACKGROUND

[0003] Mammals are colonized by microorganisms in the gastrointestinal (GI) tract, on the skin, and in other epithelial and tissue niches. The gastrointestinal tract of a healthy individual harbors an abundant and diverse microbial community. It is a complex system, providing an environment or niche for a community of many different species or organisms, including diverse strains of bacteria. Hundreds of different species may form a commensal community in the GI tract in a healthy person, and this complement of organisms evolves from the time of birth and is believed to form a functionally mature microbial population by about 3 years of age. Interactions between microbial strains in these populations and between microorganisms and the host, e.g., interactions with the host's immune system, shape the community structure, with availability of and competition for resources affecting the distribution of microorganisms.

[0004] A healthy microbiome may provide a subject with multiple benefits, including colonization resistance to a broad spectrum of pathogens, essential nutrient biosynthesis and absorption, and immune stimulation that plays a role in maintaining a healthy gut epithelium and appropriately controlled systemic immunity. Conversely, an unhealthy (e.g., dysregulated) microbiome may be associated with a disease state.

[0005] There is a need for methods for addressing problems in healthcare through assessment of the microbiome.

### SUMMARY OF THE INVENTION

[0006] In one aspect, the disclosure features a method of monitoring the response of a subject to treatment with an anti-inflammatory bowel disease (anti-IBD) therapy, the method comprising (a) determining a level of one or more of SEQ ID NOs: 1-156 in a pre-treatment sample from the subject and (b) determining a level of one or more of SEQ ID NOs: 1-156 in an on-treatment or post-treatment sample from the subject, wherein a level of one or more of SEQ ID NOs: 1-156 that is changed in the on-treatment or post-treatment sample, as compared to the respective reference level in the pre-treatment sample, indicates that the subject is responding to treatment with the anti-IBD therapy.

[0007] In another aspect, the disclosure features a method for determining that a subject having an IBD is responding to treatment with an anti-IBD therapy, comprising the steps of (a) measuring the nucleic acid level of one or more of SEQ ID NOs: 1-156 in a pre-treatment sample collected from the subject using amplification and one or more pairs of primers specific for each of the one or more of SEQ ID NOs: 1-156; (b) treating the subject with an anti-IBD therapy; (c) measuring the nucleic acid level of one or more of SEQ ID NOs: 1-156 in an on-treatment or post-treatment sample collected from the subject using amplification and one or more pairs of primers specific for each of the one or more of SEQ ID NOs: 1-156; and (d) using the amplification results to determine whether the level of one or more of SEQ ID NOs: 1-156 is changed in the on-treatment or post-treatment sample as compared to the respective reference level in the pre-treatment sample, thereby determining that the subject is responding to treatment with the anti-IBD therapy.

[0008] In some embodiments, a level of one or more of SEQ ID NOs: 1-156 is changed in the on-treatment or post-treatment sample as compared to the respective reference level in the pre-treatment sample, and the method further comprises continuing to administer the anti-IBD therapy to a subject.

[0009] In another aspect, the disclosure features a method of monitoring the response of a subject to treatment with an anti-IBD therapy, the method comprising (a) determining a level of one or more of SEQ ID NOs: 1-156 in a pre-treatment sample from the subject and (b) determining a level of one or more of SEQ ID NOs: 1-156 in an on-treatment or post-treatment sample from the subject, wherein a level of one or more of SEQ ID NOs: 1-156 that not changed in the on-treatment or post-treatment sample, as compared to the respective reference level in the pre-treatment sample, indicates that the subject is not responding to treatment with the anti-IBD therapy.

[0010] In another aspect, the disclosure features a method for determining that a subject having an inflammatory bowel disease (IBD) is not responding to treatment with an anti-IBD therapy, comprising the steps of (a) measuring the nucleic acid level of one or more of SEQ ID NOs: 1-156 in a pre-treatment sample collected from the subject using amplification and one or more pairs of primers specific for each of the one or more of SEQ ID NOs: 1-156; (b) treating the subject with an anti-IBD therapy; (c) measuring the nucleic acid level of one or more of SEQ ID NOs: 1-156 in an on-treatment or post-treatment sample collected from the subject using amplification and one or more pairs of primers specific for each of the one or more of SEQ ID NOs: 1-156; and (d) using the amplification results to determine whether the level of one or more of SEQ ID NOs: 1-156 is not changed in the on-treatment or post-treatment sample as compared to the respective reference level in the pre-treatment sample, thereby determining that the subject is not responding to treatment with the anti-IBD therapy.

[0011] In some embodiments, a level of one or more of SEQ ID NOs: 1-156 is not changed in the on-treatment or post-treatment sample as compared to the respective reference level in the pre-treatment sample, and the method further comprises discontinuing treatment of the subject with the anti-IBD therapy and/or administering an alternative anti-IBD therapy to the subject.

[0012] In another aspect, the disclosure features a method of identifying a subject who is likely to respond to treatment with an anti-IBD therapy, the method comprising determining a level of one or more of SEQ ID NOs: 1-156 in a sample from the subject, wherein a level of one or more of SEQ ID NOs: 1-156 that is changed relative to a respective reference level for SEQ ID NOs: 1-156 indicates that the subject is likely to benefit from an anti-IBD therapy.

[0013] In another aspect, the disclosure features a method for determining that a subject having an inflammatory bowel disease (IBD) is likely to respond to treatment with an anti-IBD therapy, comprising the steps of (a) measuring the nucleic acid level of one or more of SEQ ID NOs: 1-156 in a sample collected from the subject using amplification and one or more pairs of primers specific for each of the one or more of SEQ ID NOs: 1-156; and (b) using the amplification results to determine whether the level of one or more of SEQ ID NOs: 1-156 is changed relative to a respective reference level for SEQ ID NOs: 1-156, thereby determining that the subject is likely to respond to treatment with an anti-IBD therapy.

[0014] In some embodiments, a level of one or more of SEQ ID NOs: 1-156 is changed relative to the respective reference level for SEQ ID NO: 1-156 in the sample from the subject and the method further comprises administering an anti-IBD therapy to a subject.

[0015] In another aspect, the disclosure features a method of determining disease resolution in a subject with an IBD, the method comprising determining a level of one or more of SEQ ID NOs: 1-156 in a sample from the subject, wherein a level of one or more of SEQ ID NOs: 1-156 that is not substantially different from a respective reference level for SEQ ID NOs: 1-156 indicates that the subject has experienced resolution of the IBD.

[0016] In another aspect, the disclosure features a method for determining that disease resolution has occurred in a subject having an IBD, comprising the steps of (a) measuring the nucleic acid level of one or more of SEQ ID NOs: 1-156 in a sample collected from the subject using amplification and one or more pairs of primers specific for each of the one or more of SEQ ID NOs: 1-156; and (b) using the amplification results to determine whether the level of one or more of SEQ ID NOs: 1-156 is not substantially different from a respective reference level for SEQ ID NOs: 1-156, thereby determining that disease resolution has occurred in the subject.

[0017] In some embodiments, the subject is being treated with an anti-IBD therapy, a level of one or more of SEQ ID NOs: 1-156 is not substantially different from a respective reference level for SEQ ID NOs: 1-156 in the sample from the subject, and the method further comprises discontinuing treatment of the subject with the anti-IBD therapy.

[0018] In some embodiments, the method comprises determining a level of at least two, at least three, at least four, at least five, at least six, at least seven, at least eight, at least nine, at least ten, at least fifteen, at least 20, at least 30, at least 40, at least 50, at least 60, at least 70, at least 80, at least 90, at least 100, at least 110, at least 120, at least 130, at least 140, or at least 150 of SEQ ID NOs: 1-156 in a sample from the subject.

[0019] In some embodiments, the method comprises determining a level of all 156 of SEQ ID NOs: 1-156 in a sample from the subject.

[0020] In some embodiments, the anti-IBD therapy comprises fecal microbiota transplantation (FMT).

[0021] In some embodiments, the reference level is a pre-assigned level.

[0022] In some embodiments, the reference level is a level in a set of samples from a reference population.

[0023] In some embodiments, the reference population is a population of healthy subjects.

[0024] In some embodiments, the level of each of SEQ ID NOs: 1-156 that is determined in a sample from the subject is a nucleic acid level.

[0025] In some embodiments, the nucleic acid level is a DNA level.

[0026] In some embodiments, the change is a decrease relative to the reference level.

[0027] In some embodiments, the levels of at least 10%, at least 20%, at least 30%, at least 40%, at least 50%, at least 60%, at least 70%, at least 80%, at least 90%, or more than 90% of the sequences for which a level is determined are decreased relative to a respective reference level for the sequence.

[0028] In some embodiments, the change is an increase relative to the reference level.

[0029] In some embodiments, the levels of at least 10%, at least 20%, at least 30%, at least 40%, at least 50%, at least 60%, at least 70%, at least 80%, at least 90%, or more than 90% of the sequences for which a level is determined are increased relative to a respective reference level for the sequence.

[0030] In some embodiments, the sample comprises a sample of the microbiota of the subject.

[0031] In some embodiments, the sample is a fecal sample.

[0032] In another aspect, the disclosure features a kit for monitoring the response of a subject to treatment with an anti-IBD therapy, the kit comprising: (a) polypeptides or polynucleotides capable of determining the level of one or more of SEQ ID NOs: 1-156 in a sample from the subject; and optionally (b) instructions for use of the polypeptides or polynucleotides to determine the level of one or more of SEQ ID NOs: 1-156 in a pre-treatment, on-treatment, and/or post-treatment sample from the subject, wherein a level of one or more of SEQ ID NOs: 1-156 that is changed in the on-treatment or post-treatment sample, as compared to the respective reference level in the pre-treatment sample, indicates that the subject is responding to treatment with the anti-IBD therapy.

[0033] In another aspect, the disclosure features a method of monitoring the response of a subject to treatment with an anti-IBD therapy, the method comprising (a) determining a level of one or more of SEQ ID NOs: 1-156 in a pre-treatment sample from the subject and (b) determining a level of one or more of SEQ ID NOs: 1-156 in an on-treatment or post-treatment sample from the subject, wherein a level of at least 50% of SEQ ID NOs: 1-156 that is changed in the on-treatment or post-treatment sample, as compared to the respective reference level in the pre-treatment sample, indicates that the subject is responding to treatment with the anti-IBD therapy.

[0034] In some embodiments, a level of at least 50% of SEQ ID NOs: 1-156 is increased relative to a respective reference level for SEQ ID NOs: 1-156 in the sample from the subject and the method further comprises continuing to administer the anti-IBD therapy to a subject.

[0035] In some embodiments, a level of at least 60%, 70%, 80%, 90%, or 95% of SEQ ID NOs: 1-318 that is increased in a sample from the subject relative to a respective reference level for SEQ ID NOs: 1-156 and the method further comprises continuing to administer the anti-IBD therapy to a subject.

[0036] In another aspect, the disclosure features a method of treating a subject having an IBD using a therapy appropriate for treating the IBD, wherein the subject was monitored for their response to the therapy by any of the methods provided herein.

[0037] In another aspect, the disclosure features a method of treating a subject having an IBD using a therapy appropriate for treating the IBD, wherein the subject was determined to be responsive to prior treatment with the therapy by any of the methods provided herein.

[0038] In another aspect, the disclosure features a method of treating a subject having an IBD using a therapy appropriate for treating the IBD, wherein the subject was determined to be likely to respond to the treatment with the therapy by any of the methods provided herein.

[0039] In another aspect, the disclosure features a method of treating a subject having an IBD, the method comprising the steps of (a) measuring the nucleic acid level of one or more of SEQ ID NOs: 1-156 in a pre-treatment sample collected from the subject using amplification and one or more pairs of primers specific for each of the one or more of SEQ ID NOs: 1-156; (b) administering an anti-IBD therapy to a subject; (c) measuring the nucleic acid level of one or more of SEQ ID NOs: 1-156 in an on-treatment or post-treatment sample collected from the subject using amplification and one or more pairs of primers specific for each of the one or more of SEQ ID NOs: 1-156, wherein a level of one or more of SEQ ID NOs: 1-156 that is changed in the on-treatment or post-treatment sample as compared to the respective reference level in the pre-treatment sample indicates the subject is responding to treatment with the anti-IBD therapy; and (d) continuing to administer the anti-IBD therapy to a subject who has been determined to be responding to treatment with the anti-IBD therapy.

[0040] In some embodiments, the nucleic acid level of the one or more of SEQ ID NOs: 1-156 in the sample collected from the subject are measured using amplification and one or more pairs of primers specific for each of the one or more of SEQ ID NOs: 1-156, and the amplification results are used to determine whether the level of one or more of SEQ ID NOs: 1-156 is changed in the on-treatment or post-treatment sample as compared to the respective reference level in the pre-treatment sample.

[0041] In some embodiments, the method comprises measuring the nucleic acid level of at least two, at least three, at least four, at least five, at least six, at least seven, at least eight, at least nine, at least ten, at least fifteen, at least 20, at least 30, at least 40, at least 50, at least 60, at least 70, at least 80, at least 90, at least 100, at least 110, at least 120, at least 130, at least 140, or at least 150 of SEQ ID NOs: 1-156 in the sample from the subject. In some embodiments, the method comprises measuring the nucleic acid level of all 156 of SEQ ID NOs: 1-156 in the sample from the subject.

[0042] In some embodiments, the nucleic acid level is a DNA level.

[0043] In some embodiments, the change is a decrease relative to the reference level. In some embodiments, the levels of at least 10%, at least 20%, at least 30%, at least 40%, at least 50%, at least 60%, at least 70%, at least 80%, at least 90%, or more than 90% of the sequences for which a level is measured are decreased relative to a respective reference level for the sequence.

[0044] In some embodiments, the change is an increase relative to the reference level. In some embodiments, the levels of at least 10%, at least 20%, at least 30%, at least 40%, at least 50%, at least 60%, at least 70%, at least 80%, at least 90%, or more than 90% of the sequences for which a level is measured are increased relative to a respective reference level for the sequence.

[0045] In some embodiments, the sample comprises a sample of the microbiota of the subject. In some embodiments, the sample is a fecal sample.

[0046] In another aspect, the disclosure features a method of treating a subject having an IBD, the method comprising the steps of (a) measuring the nucleic acid level of each of SEQ ID NOs: 1-156 in a pre-treatment sample collected from the subject using amplification and one or more pairs of primers specific for each of the one or more of SEQ ID NOs: 1-156; (b) administering an anti-IBD therapy to a subject; (c) measuring the nucleic acid level of each of SEQ ID NOs: 1-156 in an on-treatment or post-treatment sample collected from the subject using amplification and one or more pairs of primers specific for each of the one or more of SEQ ID NOs: 1-156, wherein a level of at least 50% of SEQ ID NOs: 1-156 that is changed in the on-treatment or post-treatment sample as compared to the respective reference level in the pre-treatment sample indicates the subject is responding to treatment with the anti-MD therapy; and (d) continuing to administer the anti-IBD therapy to a subject who has been determined to be responding to treatment with the anti-IBD therapy.

[0047] In some embodiments, the nucleic acid level of each of SEQ ID NOs: 1-156 in the sample collected from the subject are measured using amplification and one or more pairs of primers specific for each of the one or more of SEQ ID NOs: 1-156, and the amplification results are used to determine whether the level of each of SEQ ID NOs: 1-156 is changed in the on-treatment or post-treatment sample as compared to the respective reference level in the pre-treatment sample.

### BRIEF DESCRIPTION OF THE DRAWING

[0048] FIG. 1 is a set of box plots showing the number (count) of metagenomic markers in donors and in patients having inflammatory bowel disease who were responders (R) or non-responders (NR) to treatment for the IBD at the indicated time point (screening, week 4 (Wk4), week 8 (Wk8), or week 16 (Wk16)). Box plots depict median, first and third quartiles and largest/smallest value within 1.5* interquartile range (IQR). The dotted line represents the theoretical maximum number of metagenomic markers (355). Statistical test is a pairwise Wilcoxon test where ns indicates p>0.05, *p<=0.05, and **: p<=0.01.

### DETAILED DESCRIPTION OF THE INVENTION

### Definitions

[0049] The term “changed,” as used herein, refers to an observable difference in the level of a marker in a subject (e.g., in a sample from the subject), as determined using techniques and methods known in the art for the measurement of the marker. A marker level that is changed in a subject may result in a difference of at least 1% (e.g., at least 5%, 10%, 15%, 20%, 25%, 30%, 35%, 40%, 45%, 50%, 55%, 60%, 65%, 70%, 75%, 80%, 85%, 90%, 95%, or 100%, or at least 2.5-fold, 3-fold, 4-fold, 5-fold, 6-fold, 7-fold, 8-fold, 9-fold, 10-fold, 15-fold, 20-fold, 25-fold, 50-fold, 75-fold, 100-fold, or more than 100-fold) more or less than a reference level (e.g., a level from a healthy subject or a level prior to treatment) (e.g., up to 100% or up to 100-fold relative to the reference level). In some embodiments, the change is an increase in the level of a marker in a subject. Increasing the marker level in a subject may result in an increase of at least 1% (e.g., at least 5%, 10%, 15%, 20%, 25%, 30%, 35%, 40%, 45%, 50%, 55%, 60%, 65%, 70%, 75%, 80%, 85%, 90%, 95%, 98%, 99%, or 100%, or at least 2.5-fold, 3-fold, 4-fold, 5-fold, 6-fold, 7-fold, 8-fold, 9-fold, 10-fold, 15-fold, 20-fold, 25-fold, 50-fold, 75-fold, 100-fold, or more than 100-fold) relative to the reference level (e.g., up to 100% or up to 100-fold relative to the reference level). In other embodiments, the change is a decrease the level of a marker in a subject. Decreasing the marker level in a subject may result in a decrease of at least 1% (e.g., at least 5%, 10%, 15%, 20%, 25%, 30%, 35%, 40%, 45%, 50%, 55%, 60%, 65%, 70%, 75%, 80%, 85%, 90%, 95%, or 100%, or at least 2.5-fold, 3-fold, 4-fold, 5-fold, 6-fold, 7-fold, 8-fold, 9-fold, 10-fold, 15-fold, 20-fold, 25-fold, 50-fold, 75-fold, 100-fold, or more than 100-fold) relative to the reference level (e.g., up to 100% or up to 100-fold relative to the reference level).

[0050] In embodiments in which a level is increased or decreased (or reduced) in a subject following a step of administering a therapy described herein, the increase or decrease may take place and/or be detectable within a range of time following the administration (e.g., within six hours, 24 hours, 3 days, a week or longer), and may take place and/or be detectable after one or more administrations (e.g., after 2, 3, 4, 5, 6, 7, 8, 9, 10, or more administrations, e.g., as part of a dosing regimen for the subject).

[0051] In some embodiments, the change in the level of a portion of the markers analyzed is an increase, while the change in the level of another portion of the markers analyzed is a decrease. In some embodiments, the change in at least 10%, 20%, 30%, 40%, 50%, 60%, 70%, 80%, 90%, 95%, or more (e.g., 100%) of the markers analyzed is an increase relative to a reference level. In some embodiments, the change in at least 10%, 20%, 30%, 40%, 50%, 60%, 70%, 80%, 90%, 95%, or more (e.g., 100%) of the markers analyzed is a decrease relative to a reference level.

[0052] The term “pharmaceutical composition,” as used herein, represents a composition formulated with a pharmaceutically acceptable excipient. For example, a “pharmaceutical composition” can be a composition that is manufactured or sold with the approval of a governmental regulatory agency as part of a therapeutic regimen for the treatment of a disease, disorder, or condition in a mammal, intended for such use, or in development for such use. In some examples, the pharmaceutical composition is a pre-approved composition.

[0053] The term “subject,” as used herein, represents a human or non-human animal (e.g., a mammal).

[0054] “Treatment” and “treating,” as used herein, refer to the medical management of a subject with the intent to improve, ameliorate, stabilize, prevent, or cure a disease, disorder, or condition. This term includes active treatment (treatment directed to improve the disease, disorder, or condition); causal treatment (treatment directed to the cause of the associated disease, disorder, or condition); palliative treatment (treatment designed for the relief of symptoms of the disease, disorder, or condition); preventative treatment (treatment directed to minimizing or partially or completely inhibiting the development of the associated disease, disorder, or condition); and supportive treatment (treatment employed to supplement another therapy).

[0055] The term “inflammatory bowel disease” or “IBD,” as used herein, refers to a condition of the bowel, e.g., the small intestine, large intestine, mouth, esophagus, stomach, rectum, and/or anus, that is characterized by inflammation. Examples of IBD include ulcerative colitis (UC) and Crohn's disease. Other examples include microscopic colitis (e.g., collagenous colitis or lyphocytic colitis), diversion colitis, Behget's disease, or indeterminate colitis.

### I. Methods of Monitoring Treatment Response and Disease Progression in Inflammatory Bowel Disease

[0056] The invention is based, in part, on the discovery that levels of gut microbiome biomarkers (i.e., markers of bacterial origin), which may be referred to as co-evolved molecules, can be used to monitor treatment response and disease progression in subjects having an inflammatory bowel disease (IBD). Accordingly, the disclosure provides methods of monitoring and treating subjects (e.g., human patients) based on this discovery.

### Methods

[0057] In some aspects, the disclosure features methods of monitoring treatment response and disease progression in IBD in a subject (e.g., a human subject), the methods comprising determining a level of one or more of SEQ ID NOs: 1-156 in a sample from the subject, wherein a level of one or more of SEQ ID NOs: 1-156 that is changed relative to a respective reference level for SEQ ID NOs: 1-156 indicates whether the subject is responding to treatment or whether the subject's disease is progressing. SEQ ID NOs: 1-156 are bacterial sequences. In some embodiments, the IBD is, e.g., ulcerative colitis or Crohn's disease. In some aspects, the disclosure features a method for determining that a subject having an IBD is responding to treatment with an anti-IBD therapy, comprising the steps of (a) measuring the nucleic acid level of one or more of SEQ ID NOs: 1-156 in a pre-treatment sample collected from the subject using amplification and one or more pairs of primers specific for each of the one or more of SEQ ID NOs: 1-156; (b) treating the subject with an anti-IBD therapy; (c) measuring the nucleic acid level of one or more of SEQ ID NOs: 1-156 in an on-treatment or post-treatment sample collected from the subject using amplification and one or more pairs of primers specific for each of the one or more of SEQ ID NOs: 1-156; and (d) using the amplification results to determine whether the level of one or more of SEQ ID NOs: 1-156 is changed in the on-treatment or post-treatment sample as compared to the respective reference level in the pre-treatment sample, thereby determining that the subject is responding to treatment with the anti-IBD therapy.

[0058] In some aspects, the disclosure features a method for determining that a subject having an inflammatory bowel disease (IBD) is not responding to treatment with an anti-IBD therapy, comprising the steps of (a) measuring the nucleic acid level of one or more of SEQ ID NOs: 1-156 in a pre-treatment sample collected from the subject using amplification and one or more pairs of primers specific for each of the one or more of SEQ ID NOs: 1-156; (b) treating the subject with an anti-IBD therapy; (c) measuring the nucleic acid level of one or more of SEQ ID NOs: 1-156 in an on-treatment or post-treatment sample collected from the subject using amplification and one or more pairs of primers specific for each of the one or more of SEQ ID NOs: 1-156; and (d) using the amplification results to determine whether the level of one or more of SEQ ID NOs: 1-156 is not changed in the on-treatment or post-treatment sample as compared to the respective reference level in the pre-treatment sample, thereby determining that the subject is not responding to treatment with the anti-IBD therapy.

[0059] In some aspects, the disclosure features a method for determining that a subject having an inflammatory bowel disease (IBD) is likely to respond to treatment with an anti-IBD therapy, comprising the steps of (a) measuring the nucleic acid level of one or more of SEQ ID NOs: 1-156 in a sample collected from the subject using amplification and one or more pairs of primers specific for each of the one or more of SEQ ID NOs: 1-156; and (b) using the amplification results to determine whether the level of one or more of SEQ ID NOs: 1-156 is changed relative to a respective reference level for SEQ ID NOs: 1-156, thereby determining that the subject is likely to respond to treatment with an anti-IBD therapy.

[0060] In some aspects, the disclosure features a method for determining that disease resolution has occurred in a subject having an IBD, comprising the steps of (a) measuring the nucleic acid level of one or more of SEQ ID NOs: 1-156 in a sample collected from the subject using amplification and one or more pairs of primers specific for each of the one or more of SEQ ID NOs: 1-156; and (b) using the amplification results to determine whether the level of one or more of SEQ ID NOs: 1-156 is not substantially different from a respective reference level for SEQ ID NOs: 1-156, thereby determining that disease resolution has occurred in the subject.

[0061] In another aspect, the disclosure features a method of treating a subject having an IBD using a therapy appropriate for treating the IBD, wherein the subject was monitored for their response to the therapy by any of the methods provided herein.

[0062] In another aspect, the disclosure features a method of treating a subject having an IBD using a therapy appropriate for treating the IBD, wherein the subject was determined to be responsive to prior treatment with the therapy by any of the methods provided herein.

[0063] In another aspect, the disclosure features a method of treating a subject having an IBD using a therapy appropriate for treating the IBD, wherein the subject was determined to be likely to respond to the treatment with the therapy by any of the methods provided herein.

[0064] In another aspect, the disclosure features a method of treating a subject having an IBD, the method comprising the steps of (a) measuring the nucleic acid level of one or more of SEQ ID NOs: 1-156 in a pre-treatment sample collected from the subject using amplification and one or more pairs of primers specific for each of the one or more of SEQ ID NOs: 1-156; (b) administering an anti-IBD therapy to a subject; (c) measuring the nucleic acid level of one or more of SEQ ID NOs: 1-156 in an on-treatment or post-treatment sample collected from the subject using amplification and one or more pairs of primers specific for each of the one or more of SEQ ID NOs: 1-156, wherein a level of one or more of SEQ ID NOs: 1-156 that is changed in the on-treatment or post-treatment sample as compared to the respective reference level in the pre-treatment sample indicates the subject is responding to treatment with the anti-IBD therapy; and (d) continuing to administer the anti-IBD therapy to a subject who has been determined to be responding to treatment with the anti-IBD therapy.

[0065] In another aspect, the disclosure features a method of treating a subject having an IBD, the method comprising the steps of (a) measuring the nucleic acid level of each of SEQ ID NOs: 1-156 in a pre-treatment sample collected from the subject using amplification and one or more pairs of primers specific for each of the one or more of SEQ ID NOs: 1-156; (b) administering an anti-IBD therapy to a subject; (c) measuring the nucleic acid level of each of SEQ ID NOs: 1-156 in an on-treatment or post-treatment sample collected from the subject using amplification and one or more pairs of primers specific for each of the one or more of SEQ ID NOs: 1-156, wherein a level of at least 50% of SEQ ID NOs: 1-156 that is changed in the on-treatment or post-treatment sample as compared to the respective reference level in the pre-treatment sample indicates the subject is responding to treatment with the anti-IBD therapy; and (d) continuing to administer the anti-IBD therapy to a subject who has been determined to be responding to treatment with the anti-IBD therapy.

[0066] In some embodiments, the sample comprises a sample of the microbiota (e.g., the gut microbiota) of the subject. In some embodiments, the sample is a fecal sample. In some embodiments, the sample is a colon or rectal biopsy.

[0067] In some embodiments, the method comprises determining or measuring a level of at least 2, at least 3, at least 4, at least 5, at least 6, at least 7, at least 8, at least 9, at least 10, at least 15, at least 20, at least 25, at least 30, at least 35, at least 40, at least 45, at least 50, at least 55, at least 60, at least 65, at least 70, at least 75, at least 80, at least 85, at least 90, at least 95, at least 100, at least 105, at least 110, at least 115, at least 120, at least 125, at least 130, at least 135, at least 140, at least 145, at least 150, or at least of SEQ ID NOs: 1-156 in a sample from the subject, e.g., comprises determining or measuring a level of 1-5, 5-10, 10-15, 15-20, 20-25, 25-30, 30-35, 35-40, 40-45, 45-50, 50-55, 55-60, 60-65, 65-70, 70-75, 75-80, 80-85, 85-90, 90-95, 95-100, 100-105, 105-110, 110-115, 115-120, 120-125, 125-130, 130-135, 135-140, 140-145, 145-150, or 150-156 of SEQ ID NOs: 1-156 in the sample from the subject. In some embodiments, the method comprises determining or measuring a level of all 156 of SEQ ID NOs: 1-156 in a sample from the subject.

[0068] In some embodiments, a change in the level of at least 2, at least 3, at least 4, at least 5, at least 6, at least 7, at least 8, at least 9, at least 10, at least 15, at least 20, at least 25, at least 30, at least 35, at least 40, at least 45, at least 50, at least 55, at least 60, at least 65, at least 70, at least 75, at least 80, at least 85, at least 90, at least 95, at least 100, at least 105, at least 110, at least 115, at least 120, at least 125, at least 130, at least 135, at least 140, at least 145, at least 150, or at least 155 of SEQ ID NOs: 1-156 in a sample from the subject, e.g., a change in the level of 1-5, 5-10, 10-15, 15-20, 20-25, 25-30, 30-35, 35-40, 40-45, 45-50, 50-55, 55-60, 60-65, 65-70, 70-75, 75-80, 80-85, 85-90, 90-95, 95-100, 100-105, 105-110, 110-115, 115-120, 120-125, 125-130, 130-135, 135-140, 140-145, 145-150, or 150-156 of SEQ ID NOs: 1-156 in the sample from the subject relative to a respective reference level for SEQ ID NOs: 1-156 indicates that the subject is responding to treatment. In some embodiments, a change in the level of all 156 of SEQ ID NOs: 1-156 relative to a respective reference level for SEQ ID NOs: 1-156 indicates that the subject is responding to treatment.

[0069] In some embodiments, a change in the level of at least 5%, at least 10%, at least 15%, at least 20%, at least 25%, at least 30%, at least 35%, at least 40%, at least 45%, at least 50%, at least 55%, at least 60%, at least 65%, at least 70%, at least 75%, at least 80%, at least 85%, at least 95%, at least 98%, at least 99%, or 100% of the total number of SEQ ID NOs: 1-156 measured in a sample from the subject relative to a respective reference level for SEQ ID NOs: 1-156 indicates that the subject is responding to treatment.

[0070] In some embodiments, a threshold number of one or more of SEQ ID NOs: 1-156 is changed relative to the respective reference level for SEQ ID NO: 1-156 in the sample from the subject (e.g., a number of SEQ ID NOs: 1-156 that has been determined to indicate that the patient is responding to treatment, e.g., a level of at least 1, at least 2, at least 3, at least 4, at least 5, at least 6, at least 7, at least 8, at least 9, at least 10, at least 15, at least 20, at least 25, at least 30, at least 35, at least 40, at least 45, at least 50, at least 55, at least 60, at least 65, at least 70, at least 75, at least 80, at least 85, at least 90, at least 95, at least 100, at least 105, at least 110, at least 115, at least 120, at least 125, at least 130, at least 135, at least 140, at least 145, at least 150, or at least 155 of SEQ ID NOs: 1-156 in a sample from the subject (e.g., a level of 1-5, 5-10, 10-15, 15-20, 20-25, 25-30, 30-35, 35-40, 40-45, 45-50, 50-55, 55-60, 60-65, 65-70, 70-75, 75-80, 80-85, 85-90, 90-95, 95-100, 100-105, 105-110, 110-115, 115-120, 120-125, 125-130, 130-135, 135-140, 140-145, 145-150, or 150-156)) of SEQ ID NOs: 1-156 is changed relative to the respective reference level for SEQ ID NO: 1-156 in the sample from the subject, and the method further comprises administering an anti-IBD therapy to a subject.

[0071] The anti-IBD therapy may be any medicament, treatment, or combination thereof suitable for the treatment of an IBD. In some aspects, the anti-IBD therapy comprises an anti-integrin therapy. In some aspects, the anti-integrin therapy targets integrin α₄β₇. In some aspects, the anti-integrin therapy is vedolizumab. In some embodiments, the anti-IBD therapy comprises a biologic therapy, an anti-inflammatory agent, an antibiotic, or an immune system suppressor. In some embodiments, the biologic therapy is vedolizumab (ENTYVIO®), infliximab (REMICADE®), adalimumab (HUMIRA®), golimumab (SIMPONI®), certolizumab (CIMZIA®), risankizumab (SKYRIZI®), or ustekinumab (STELARA®); the anti-inflammatory agent is a corticosteroid or an aminosalicylate; the antibiotic is ciprofloxacin (cipro) or metronidazole (Flagyl); or the immune system suppressor is azathioprine (AZASAN®, IMURAN®), mercaptopurine (PURINETHOL®, PURIXAN®), methotrexate (TREXALL®), tofacitinib (XELJANZ®), upadacitinib (RINVOQ®), or ozanimod (ZEPOSIA®). Any one or more of these therapies may optionally be used in any of the methods described herein as employing an anti-IBD therapy. In some aspects, the anti-IBD therapy further comprises treatment by fecal microbiota transplant (FMT).

[0072] In some embodiments, the respective reference level for SEQ ID NOs: 1-156 is a pre-assigned level of one of SEQ ID NOs: 1-156.

[0073] In some embodiments, the respective reference level for SEQ ID NOs: 1-156 is a level in a set of samples from a reference population, e.g., a population of healthy subjects (e.g., a population of subjects not having an IBD and/or a population of subjects having a healthy gut microbiome). In some embodiments, the respective reference level for SEQ ID NOs: 1-156 is a pre-treatment level from the subject or from a set of samples from a reference population (e.g., subjects having IBD).

[0074] In some embodiments, the level of each of SEQ ID NOs: 1-156 that is determined or measured in a sample from the subject is a nucleic acid level, e.g., a DNA level or an RNA level. In some embodiments, the nucleic acid level is a DNA level, which may be detected, e.g., using a PCR-based method. In other embodiments, detection of a level of one or more of SEQ ID NOs: 1-156 can optionally comprise, for example, detection of RNA levels, which can be achieved by, e.g., RT-PCR, RNA-Seq, and/or methods including the use of microarrays, as are known in the art. In other embodiments, the methods can focus on the detection of protein levels, which can be carried out using standard approaches (e.g., immunoassay-based approaches).

[0075] In some embodiments, the change in a level of one or more of SEQ ID NOs: 1-156 in the sample from the subject is a decrease relative to the respective reference level for SEQ ID NOs: 1-156 (e.g., a decrease of at least 1%, 2%, 3%, 4%, 5%, 6%, 7%, 8%, 9%, 10%, 11%, 12%, 13%, 14%, 15%, 16%, 17%, 18%, 19%, 20%, 21%, 22%, 23%, 24%, 25%, 26%, 27%, 28%, 29%, 30%, 31%, 32%, 33%, 34%, 35%, 36%, 37%, 38%, 39%, 40%, 41%, 42%, 43%, 44%, 45%, 46%, 47%, 48%, 49%, 50%, 51%, 52%, 53%, 54%, 55%, 56%, 57%, 58%, 59%, 60%, 61%, 62%, 63%, 64%, 65%, 66%, 67%, 68%, 69%, 70%, 71%, 72%, 73%, 74%, 75%, 76%, 77%, 78%, 79%, 80%, 81%, 82%, 83%, 84%, 85%, 86%, 87%, 88%, 89%, 90%, 91%, 92%, 93%, 94%, 95%, 96%, 97%, 98%, 99%, or 100%, e.g., a decrease of, e.g., at least 2.5-fold, 3-fold, 4-fold, 5-fold, 6-fold, 7-fold, 8-fold, 9-fold, 10-fold, 15-fold, 20-fold, 25-fold, 50-fold, 75-fold, 100-fold, or more than 100-fold) relative to the respective reference level for SEQ ID NOs: 1-156; or a decrease of 1-5%, 5-10%, 10-15%, 15-20%, 20-25%, 25-30%, 30-35%, 35-40%, 40-45%, 45-50%, 50-55%, 55-60%, 60-65%, 65-70%, 70-75%, 75-80%, 0-85%, 85-90%, 90-95%, or 95-100% relative to the respective reference level for SEQ ID NOs: 1-156).

[0076] In some aspects, the levels of at least 5%, at least 10%, at least 15%, at least 20%, at least 25%, at least 30%, at least 35%, at least 40%, at least 45%, at least 50%, at least 55%, at least 60%, at least 65%, at least 70%, at least 75%, at least 80%, at least 85%, at least 90%, at least 95%, at least 99%, or more than 99% of the sequences for which a level is determined or measured in the sample from the subject (i.e., one or more of SEQ ID NOs: 1-156) are decreased relative to a respective reference level for the sequence, e.g., 5-10%, 10-15%, 15-20%, 20-25%, 25-30%, 30-35%, 35-40%, 40-45%, 45-50%, 50-55%, 55-60%, 60-65%, 65-70%, 70-75%, 75-80%, 0-85%, 85-90%, 90-95%, or 95-100% of the sequences for which a level is determined or measured are decreased relative to a respective reference level for the sequence.

[0077] In some embodiments, the change in a level of one or more of SEQ ID NOs: 1-156 in the sample from the subject is an increase relative to the respective reference level for SEQ ID NOs: 1-156 (e.g., an increase of at least 1%, 2%, 3%, 4%, 5%, 6%, 7%, 8%, 9%, 10%, 11%, 12%, 13%, 14%, 15%, 16%, 17%, 18%, 19%, 20%, 21%, 22%, 23%, 24%, 25%, 26%, 27%, 28%, 29%, 30%, 31%, 32%, 33%, 34%, 35%, 36%, 37%, 38%, 39%, 40%, 41%, 42%, 43%, 44%, 45%, 46%, 47%, 48%, 49%, 50%, 51%, 52%, 53%, 54%, 55%, 56%, 57%, 58%, 59%, 60%, 61%, 62%, 63%, 64%, 65%, 66%, 67%, 68%, 69%, 70%, 71%, 72%, 73%, 74%, 75%, 76%, 77%, 78%, 79%, 80%, 81%, 82%, 83%, 84%, 85%, 86%, 87%, 88%, 89%, 90%, 91%, 92%, 93%, 94%, 95%, 96%, 97%, 98%, 99%, 100%, or more than 100%, e.g., an increase of, e.g., 2.5-fold, 3-fold, 4-fold, 5-fold, 6-fold, 7-fold, 8-fold, 9-fold, 10-fold, 15-fold, 20-fold, 25-fold, 50-fold, 75-fold, 100-fold, or more than 100-fold, relative to the respective level for SEQ ID NOs: 1-156; or an increase of 1-5%, 5-10%, 10-15%, 15-20%, 20-25%, 25-30%, 30-35%, 35-40%, 40-45%, 45-50%, 50-55%, 55-60%, 60-65%, 65-70%, 70-75%, 75-80%, 0-85%, 85-90%, 90-95%, 95-100%, or more than 100%, relative to the respective reference level for SEQ ID NOs: 1-156).

[0078] In some aspects, the levels of at least 5%, at least 10%, at least 15%, at least 20%, at least 25%, at least 30%, at least 35%, at least 40%, at least 45%, at least 50%, at least 55%, at least 60%, at least 65%, at least 70%, at least 75%, at least 80%, at least 85%, at least 90%, at least 95%, at least 99%, or more than 99% of the sequences for which a level is determined or measured in the sample from the subject (i.e., one or more of SEQ ID NOs: 1-156) are increased relative to a respective reference level for the sequence, e.g., 5-10%, 10-15%, 15-20%, 20-25%, 25-30%, 30-35%, 35-40%, 40-45%, 45-50%, 50-55%, 55-60%, 60-65%, 65-70%, 70-75%, 75-80%, 0-85%, 85-90%, 90-95%, or 95-100% of the sequences for which a level is determined or measured are increased relative to a respective reference level for the sequence.

[0079] In some aspects, a level of at least 50%, 51%, 52%, 53%, 54%, 55%, 56%, 57%, 58%, 59%, 60%, 61%, 62%, 63%, 64%, 65%, 66%, 67%, 68%, 69%, 70%, 71%, 72%, 73%, 74%, 75%, 76%, 77%, 78%, 79%, 80%, 81%, 82%, 83%, 84%, 85%, 86%, 87%, 88%, 89%, 90%, 91%, 92%, 93%, 94%, 95%, 96%, 97%, 98%, or 99% of SEQ ID NOs: 1-156 that is increased in a sample from the subject relative to a respective reference level for SEQ ID NOs: 1-156 indicates that the subject is responding to treatment.

[0080] Determination of whether a difference detected is significant can be carried out using standard methods, as well as statistical analysis. In some embodiments, a difference detected is a change of at least 5%, 10%, 20%, 30%, 40%, 50%, 75%, 100%, or more, e.g., at least 2.5-fold, 3-fold, 4-fold, 5-fold, 6-fold, 7-fold, 8-fold, 9-fold, 10-fold, 15-fold, 20-fold, 25-fold, 50-fold, 75-fold, 100-fold, or more than 100-fold, relative to a reference level.

### II. Articles of Manufacture and Kits

[0081] In another aspect of the invention, an article of manufacture or kit containing materials useful for the diagnosis, prognostic assessment, and/or treatment of individuals is provided.

[0082] In one aspect, the disclosure features a kit or article of manufacture for diagnosing inflammatory bowel disease (IBD) in a subject, the kit comprising (a) reagents for determining a level of one or more of SEQ ID NOs: 1-156 in a sample from the subject (e.g., polynucleotides or polypeptides capable of use in determining the level of one or more of SEQ ID NOs: 1-156 in a sample from the subject); and optionally (b) instructions for use of the polynucleotides or polypeptides to determine the level of one or more of SEQ ID NOs: 1-156 in the sample from the subject, wherein a change in the level of one or more of SEQ ID NOs: 1-156 relative to a respective reference level for SEQ ID NOs: 1-156, as described herein, indicates whether the subject is responding to treatment or whether their disease is progressing. In some embodiments, reagents are included for determining a level of at least 5%, at least 10%, at least 15%, at least 20%, at least 25%, at least 30%, at least 35%, at least 40%, at least 45%, at least 50%, at least 55%, at least 60%, at least 65%, at least 70%, at least 75%, at least 80%, at least 85%, at least 90%, at least 95%, at least 99%, or more than 99% of the sequences of SEQ ID NOs: 1-156.

[0083] In some aspects, the reagents for determining a level of one or more of SEQ ID NOs: 1-156 in a sample from the subject comprise one or more polynucleotides (e.g., PCR primers) that hybridize to a complement of a locus of one or more of SEQ ID NOs: 1-156 under stringent conditions and may be used to amplify all or a portion of any one or more of SEQ ID NOs: 1-156, as described herein. In some aspects, the instructions indicate that the one or more oligonucleotides (e.g., PCR primers) may be used to evaluate the presence and/or level of one or more of SEQ ID NOs: 1-156 in a sample from the subject and provide instructions for using the polynucleotide(s) for evaluating the presence and/or level of one or more of SEQ ID NOs: 1-156 in the sample.

[0084] For polynucleotide-based articles of manufacture or kits, the article of manufacture or kit may include, for example: (1) an oligonucleotide, e.g., a detectably labeled oligonucleotide, which hybridizes to a nucleic acid sequence encoding a protein, (2) a pair of primers useful for amplifying a nucleic acid molecule, or (3) a microarray comprising multiple oligonucleotide probes. For protein-based articles of manufacture or kits, the article of manufacture or kit may include, for example, one or more antibody-based reagents. The article of manufacture or kit can also include, e.g., a buffering agent, a preservative, or a protein-stabilizing agent. The article of manufacture or kit can further include components necessary for detecting the detectable label (e.g., an enzyme or a substrate). The article of manufacture or kit can further include components necessary for analyzing the sequence of a sample (e.g., a restriction enzyme or a buffer). The article of manufacture or kit can also contain a control sample or a series of control samples that can be assayed and compared to the test sample (e.g., a reference sample, as described herein). Each component of the article of manufacture or kit can be enclosed within an individual container and all of the various containers can be within a single package, along with instructions for interpreting the results of the assays performed using the kit.

[0085] The following examples are meant to illustrate the invention. They are not meant to limit the invention in any way.

### III. Examples

### Example 1. Identification of Markers

### A. Assembly and Annotation of Metagenomic Markers

[0086] Paired end reads from healthy Human Microbiome Project 1 (HMP1; Human Microbiome Project Consortium, Nature, 486(7402): 207-214, 2012) individuals were downloaded from the National Center for Bioinformatics (NCBI) Short Read Archive (SRA) and assembled using metaSPAdes (cab.spbu.ru/software/spades/). Metagenomic markers were annotated using antiSMASH4.0 (docs.antismash.secondarymetabolites.org/) with the following non-default parameters: -c 3 --smcogs --disable-embl. Annotated metagenomic markers were clustered using all vs. all diamond (https://github.com/bbuchfink/diamond) blastx. Blastx results were filtered using a python script requiring (a) E-value <1×10⁻⁵, (b) 90% coverage of length of coding sequence, and (c) >50% of coding sequences in a metagenomic marker present. Metagenomic markers were then grouped using markov clustering, resulting in a dereplicated library of 8,211 representative metagenomic markers identified in healthy human gut metagenomes.

### B. EMP Selection

[0087] A subset of metagenomic markers prevalent in healthy cohorts, referred to as essential microbial products (EMPs), were identified by clustering metagenomic markers presence/absence across 592 healthy patients from various geographic, genetic, and lifestyle backgrounds. Clusters with a mean prevalence >0.7 and z-score >10 within cohort were selected. To take sample imbalance into account, a proportion test was performed to assess stability across cohorts. This resulted in 1321 EMPs. For diagnostic analyses, metagenomic markers were subsetted from the full dataset, resulting in 1171 EMPs. Metagenomic markers were further subsetted, resulting in 590 EMPs.

### C. Metagenomic Data

[0088] Raw metagenomic reads from Paramsothy et al., Gastroenterology, 156(5): 1440-1454.E2, 2019 were downloaded from the European Nucleotide Archive (ENA). A total of 284 metagenomes were available. The Paramsothy et al. study presents the results of an analysis of fecal matter samples in a double-blind trial of 81 patients having active ulcerative colitis (UC) who were treated with an initial colonoscopic infusion and then intensive multidonor fecal microbiota transplantation (FMT) or placebo enemas, 5 days per week for 8 weeks.

### D. Modeling

[0089] EMP abundance data were binarized and filtered to include only 355 EMPs associated with inflammatory bowel disease (IBD) from an orthogonal analysis.

### E. Visualization

[0090] Boxplots (FIG. 1) depict median, first and third quartiles, and largest/smallest value within 1.5* interquartile range (IQR). The dotted line represents the theoretical maximum number of metagenomic markers. Statistical test is a pairwise Wilcoxon test where ns indicates p>0.05, *p<=0.05, and **: p<=0.01

### F. Conclusions

[0091] A set of 156 metagenomic markers (SEQ ID NOs: 1-156) were found to be significant predictors in a model discriminating between IBD patients who were responders vs. non-responders to anti-IBD therapy (FIG. 1).

### OTHER EMBODIMENTS

[0092] Various modifications and variations of the described invention will be apparent to those skilled in the art without departing from the scope and spirit of the invention. Although the invention has been described in connection with specific embodiments, it should be understood that the invention as claimed should not be unduly limited to such specific embodiments. Indeed, various modifications of the described modes for carrying out the invention that are obvious to those skilled in the art are intended to be within the scope of the invention.

[0093] Other embodiments are in the claims.

What is claimed is:

1. A method of monitoring the response of a subject to treatment with an anti-inflammatory bowel disease (anti-IBD) therapy, the method comprising (a) determining a level of one or more of SEQ ID NOs: 1-156 in a pre-treatment sample from the subject and (b) determining a level of one or more of SEQ ID NOs: 1-156 in an on-treatment or post-treatment sample from the subject, wherein a level of one or more of SEQ ID NOs: 1-156 that is changed in the on-treatment or post-treatment sample, as compared to the respective reference level in the pre-treatment sample, indicates that the subject is responding to treatment with the anti-IBD therapy.

2. A method for determining that a subject having an IBD is responding to treatment with an anti-IBD therapy, comprising the steps of:
(a) measuring the nucleic acid level of one or more of SEQ ID NOs: 1-156 in a pre-treatment sample collected from the subject using amplification and one or more pairs of primers specific for each of the one or more of SEQ ID NOs: 1-156;
(b) treating the subject with an anti-IBD therapy;
(c) measuring the nucleic acid level of one or more of SEQ ID NOs: 1-156 in an on-treatment or post-treatment sample collected from the subject using amplification and one or more pairs of primers specific for each of the one or more of SEQ ID NOs: 1-156; and
(d) using the amplification results to determine whether the level of one or more of SEQ ID NOs: 1-156 is changed in the on-treatment or post-treatment sample as compared to the respective reference level in the pre-treatment sample, thereby determining that the subject is responding to treatment with the anti-IBD therapy.

3. The method of claim 1 or 2, wherein a level of one or more of SEQ ID NOs: 1-156 is changed in the on-treatment or post-treatment sample as compared to the respective reference level in the pre-treatment sample, and the method further comprises continuing to administer the anti-IBD therapy to a subject.

4. A method of monitoring the response of a subject to treatment with an anti-IBD therapy, the method comprising (a) determining a level of one or more of SEQ ID NOs: 1-156 in a pre-treatment sample from the subject and (b) determining a level of one or more of SEQ ID NOs: 1-156 in an on-treatment or post-treatment sample from the subject, wherein a level of one or more of SEQ ID NOs: 1-156 that not changed in the on-treatment or post-treatment sample, as compared to the respective reference level in the pre-treatment sample, indicates that the subject is not responding to treatment with the anti-IBD therapy.

5. A method for determining that a subject having an inflammatory bowel disease (IBD) is not responding to treatment with an anti-IBD therapy, comprising the steps of:
(a) measuring the nucleic acid level of one or more of SEQ ID NOs: 1-156 in a pre-treatment sample collected from the subject using amplification and one or more pairs of primers specific for each of the one or more of SEQ ID NOs: 1-156;
(b) treating the subject with an anti-IBD therapy;
(c) measuring the nucleic acid level of one or more of SEQ ID NOs: 1-156 in an on-treatment or post-treatment sample collected from the subject using amplification and one or more pairs of primers specific for each of the one or more of SEQ ID NOs: 1-156; and
(d) using the amplification results to determine whether the level of one or more of SEQ ID NOs: 1-156 is not changed in the on-treatment or post-treatment sample as compared to the respective reference level in the pre-treatment sample, thereby determining that the subject is not responding to treatment with the anti-IBD therapy.

6. The method of claim 4 or 5, wherein a level of one or more of SEQ ID NOs: 1-156 is not changed in the on-treatment or post-treatment sample as compared to the respective reference level in the pre-treatment sample, and the method further comprises discontinuing treatment of the subject with the anti-IBD therapy and/or administering an alternative anti-IBD therapy to the subject.

7. A method of identifying a subject who is likely to respond to treatment with an anti-IBD therapy, the method comprising determining a level of one or more of SEQ ID NOs: 1-156 in a sample from the subject, wherein a level of one or more of SEQ ID NOs: 1-156 that is changed relative to a respective reference level for SEQ ID NOs: 1-156 indicates that the subject is likely to benefit from an anti-IBD therapy.

8. A method for determining that a subject having an inflammatory bowel disease (IBD) is likely to respond to treatment with an anti-IBD therapy, comprising the steps of:
(a) measuring the nucleic acid level of one or more of SEQ ID NOs: 1-156 in a sample collected from the subject using amplification and one or more pairs of primers specific for each of the one or more of SEQ ID NOs: 1-156; and
(b) using the amplification results to determine whether the level of one or more of SEQ ID NOs: 1-156 is changed relative to a respective reference level for SEQ ID NOs: 1-156, thereby determining that the subject is likely to respond to treatment with an anti-IBD therapy.

9. The method of claim 7 or 8, wherein a level of one or more of SEQ ID NOs: 1-156 is changed relative to the respective reference level for SEQ ID NO: 1-156 in the sample from the subject and the method further comprises administering an anti-IBD therapy to a subject.

10. A method of determining disease resolution in a subject with an IBD, the method comprising determining a level of one or more of SEQ ID NOs: 1-156 in a sample from the subject, wherein a level of one or more of SEQ ID NOs: 1-156 that is not substantially different from a respective reference level for SEQ ID NOs: 1-156 indicates that the subject has experienced resolution of the IBD.

11. A method for determining that disease resolution has occurred in a subject having an IBD, comprising the steps of:
(a) measuring the nucleic acid level of one or more of SEQ ID NOs: 1-156 in a sample collected from the subject using amplification and one or more pairs of primers specific for each of the one or more of SEQ ID NOs: 1-156; and
(b) using the amplification results to determine whether the level of one or more of SEQ ID NOs: 1-156 is not substantially different from a respective reference level for SEQ ID NOs: 1-156, thereby determining that disease resolution has occurred in the subject.

12. The method of claim 10 or 11, wherein the subject is being treated with an anti-IBD therapy, a level of one or more of SEQ ID NOs: 1-156 is not substantially different from a respective reference level for SEQ ID NOs: 1-156 in the sample from the subject, and the method further comprises discontinuing treatment of the subject with the anti-IBD therapy.

13. The method of any one of claims 1-8, wherein the method comprises determining or measuring a level of at least two, at least three, at least four, at least five, at least six, at least seven, at least eight, at least nine, at least ten, at least fifteen, at least 20, at least 30, at least 40, at least 50, at least 60, at least 70, at least 80, at least 90, at least 100, at least 110, at least 120, at least 130, at least 140, or at least 150 of SEQ ID NOs: 1-156 in the sample from the subject.

14. The method of claim 13, wherein the method comprises determining or measuring a level of all 156 of SEQ ID NOs: 1-156 in the sample from the subject.

15. The method of any one of claims 1-9 and 12-14, wherein the anti-IBD therapy comprises fecal microbiota transplantation (FMT).

16. The method of any one of claims 7-15, wherein the reference level is a pre-assigned level.

17. The method of any one of claims 7-16, wherein the reference level is a level in a set of samples from a reference population.

18. The method of claim 17, wherein the reference population is a population of healthy subjects.

19. The method of any one of claims 1-18, wherein the level of each of SEQ ID NOs: 1-156 that is determined or measured in the sample from the subject is a nucleic acid level.

20. The method of claim 19, wherein the nucleic acid level is a DNA level.

21. The method of any one of claims 1-20, wherein the change is a decrease relative to the reference level.

22. The method of claim 21, wherein the levels of at least 10%, at least 20%, at least 30%, at least 40%, at least 50%, at least 60%, at least 70%, at least 80%, at least 90%, or more than 90% of the sequences for which a level is determined or measured are decreased relative to a respective reference level for the sequence.

23. The method of any one of claims 1-20, wherein the change is an increase relative to the reference level.

24. The method of claim 23, wherein the levels of at least 10%, at least 20%, at least 30%, at least 40%, at least 50%, at least 60%, at least 70%, at least 80%, at least 90%, or more than 90% of the sequences for which a level is determined or measured are increased relative to a respective reference level for the sequence.

25. The method of any one of claims 1-24, wherein the sample comprises a sample of the microbiota of the subject.

26. The method of any one of claims 1-25, wherein the sample is a fecal sample.

27. A kit for monitoring the response of a subject to treatment with an anti-IBD therapy, the kit comprising:
(a) polypeptides or polynucleotides capable of determining the level of one or more of SEQ ID NOs: 1-156 in a sample from the subject; and optionally
(b) instructions for use of the polypeptides or polynucleotides to determine the level of one or more of SEQ ID NOs: 1-156 in a pre-treatment, on-treatment, and/or post-treatment sample from the subject, wherein a level of one or more of SEQ ID NOs: 1-156 that is changed in the on-treatment or post-treatment sample, as compared to the respective reference level in the pre-treatment sample, indicates that the subject is responding to treatment with the anti-IBD therapy.

28. A method of monitoring the response of a subject to treatment with an anti-IBD therapy, the method comprising (a) determining a level of one or more of SEQ ID NOs: 1-156 in a pre-treatment sample from the subject and (b) determining a level of one or more of SEQ ID NOs: 1-156 in an on-treatment or post-treatment sample from the subject, wherein a level of at least 50% of SEQ ID NOs: 1-156 that is changed in the on-treatment or post-treatment sample, as compared to the respective reference level in the pre-treatment sample, indicates that the subject is responding to treatment with the anti-IBD therapy.

29. The method of claim 28, wherein a level of at least 50% of SEQ ID NOs: 1-156 is changed relative to a respective reference level for SEQ ID NOs: 1-156 in the sample from the subject and the method further comprises continuing to administer the anti-IBD therapy to a subject.

30. The method of claim 28 or 29, wherein a level of at least 60%, 70%, 80%, 90%, or 95% of SEQ ID NOs: 1-318 that is changed in a sample from the subject relative to a respective reference level for SEQ ID NOs: 1-156 and the method further comprises continuing to administer the anti-IBD therapy to a subject.

31. A method of treating a subject having an IBD using a therapy appropriate for treating the IBD, wherein the subject was monitored for their response to the therapy by a method of any one of claims 1, 3, 4, 6, 13-26, and 28-30.

32. A method of treating a subject having an IBD using a therapy appropriate for treating the IBD, wherein the subject was determined to be responsive to prior treatment with the therapy by a method of any one of claims 2, 3, and 13-26.

33. A method of treating a subject having an IBD using a therapy appropriate for treating the IBD, wherein the subject was determined to be likely to respond to the treatment with the therapy by a method of any one of claims 8, 9, and 13-26.

34. A method of treating a subject having an IBD, the method comprising the steps of:
(a) measuring the nucleic acid level of one or more of SEQ ID NOs: 1-156 in a pre-treatment sample collected from the subject using amplification and one or more pairs of primers specific for each of the one or more of SEQ ID NOs: 1-156;
(b) administering an anti-IBD therapy to a subject;
(c) measuring the nucleic acid level of one or more of SEQ ID NOs: 1-156 in an on-treatment or post-treatment sample collected from the subject using amplification and one or more pairs of primers specific for each of the one or more of SEQ ID NOs: 1-156, wherein a level of one or more of SEQ ID NOs: 1-156 that is changed in the on-treatment or post-treatment sample as compared to the respective reference level in the pre-treatment sample indicates the subject is responding to treatment with the anti-IBD therapy; and
(d) continuing to administer the anti-IBD therapy to a subject who has been determined to be responding to treatment with the anti-IBD therapy.

35. The method of claim 34, wherein the nucleic acid level of the one or more of SEQ ID NOs: 1-156 in the sample collected from the subject are measured using amplification and one or more pairs of primers specific for each of the one or more of SEQ ID NOs: 1-156, and the amplification results are used to determine whether the level of one or more of SEQ ID NOs: 1-156 is changed in the on-treatment or post-treatment sample as compared to the respective reference level in the pre-treatment sample.

36. The method of claim 34 or 35, wherein the method comprises measuring the nucleic acid level of at least two, at least three, at least four, at least five, at least six, at least seven, at least eight, at least nine, at least ten, at least fifteen, at least 20, at least 30, at least 40, at least 50, at least 60, at least 70, at least 80, at least 90, at least 100, at least 110, at least 120, at least 130, at least 140, or at least 150 of SEQ ID NOs: 1-156 in the sample from the subject.

37. The method of claim 36, wherein the method comprises measuring the nucleic acid level of all 156 of SEQ ID NOs: 1-156 in the sample from the subject.

38. The method of any one of claims 34-37, wherein the nucleic acid level is a DNA level.

39. The method of any one of claims 34-38, wherein the change is a decrease relative to the reference level.

40. The method of claim 39, wherein the levels of at least 10%, at least 20%, at least 30%, at least 40%, at least 50%, at least 60%, at least 70%, at least 80%, at least 90%, or more than 90% of the sequences for which a level is measured are decreased relative to a respective reference level for the sequence.

41. The method of any one of claims 34-38, wherein the change is an increase relative to the reference level.

42. The method of claim 41, wherein the levels of at least 10%, at least 20%, at least 30%, at least 40%, at least 50%, at least 60%, at least 70%, at least 80%, at least 90%, or more than 90% of the sequences for which a level is measured are increased relative to a respective reference level for the sequence.

43. The method of any one of claims 34-42, wherein the sample comprises a sample of the microbiota of the subject.

44. The method of any one of claims 34-43, wherein the sample is a fecal sample.

45. A method of treating a subject having an IBD, the method comprising the steps of:
(a) measuring the nucleic acid level of each of SEQ ID NOs: 1-156 in a pre-treatment sample collected from the subject using amplification and one or more pairs of primers specific for each of the one or more of SEQ ID NOs: 1-156;
(b) administering an anti-IBD therapy to a subject;
(c) measuring the nucleic acid level of each of SEQ ID NOs: 1-156 in an on-treatment or post-treatment sample collected from the subject using amplification and one or more pairs of primers specific for each of the one or more of SEQ ID NOs: 1-156, wherein a level of at least 50% of SEQ ID NOs: 1-156 that is changed in the on-treatment or post-treatment sample as compared to the respective reference level in the pre-treatment sample indicates the subject is responding to treatment with the anti-IBD therapy; and
(d) continuing to administer the anti-IBD therapy to a subject who has been determined to be responding to treatment with the anti-IBD therapy.

46. The method of claim 45, wherein the nucleic acid level of each of SEQ ID NOs: 1-156 in the sample collected from the subject are measured using amplification and one or more pairs of primers specific for each of the one or more of SEQ ID NOs: 1-156, and the amplification results are used to determine whether the level of each of SEQ ID NOs: 1-156 is changed in the on-treatment or post-treatment sample as compared to the respective reference level in the pre-treatment sample.

47. The method of any one of claims 1 to 26 and 28 to 46, wherein the anti-IBD therapy to which a response is being determined or monitored, or that is administered after the determining or monitoring, comprises a biologic therapy, an anti-inflammatory agent, an antibiotic, an immune system suppressor, or an anti-integrin therapy that optionally targets integrin α₄β₇.

48. The method of claim 47, wherein the biologic therapy is vedolizumab (ENTYVIO®), infliximab (REMICADE®), adalimumab (HUMIRA®), golimumab (SIMPONI®), certolizumab (CIMZIA®), risankizumab (SKYRIZI®), or ustekinumab (STELARA®); the anti-inflammatory agent is a corticosteroid or an aminosalicylate; the antibiotic is ciprofloxacin (cipro) or metronidazole (Flagyl); or the immune system suppressor is azathioprine (AZASAN®, IMURAN®), mercaptopurine (PURINETHOL®, PURIXAN®), methotrexate (TREXALL®), tofacitinib (XELJANZ®), upadacitinib (RINVOQ®), or ozanimod (ZEPOSIA®).

49. The method of 47 or 48, wherein the anti-IBD therapy further comprises treatment by fecal microbiota transplant (FMT).

The application's sequence listing, which the Patent Office published only in electronic form, follows.

SEQUENCE LISTING (156 sequences)

SEQ ID NO: 1 - DNA, 10572 bp, unidentified
  source 1..10572: mol_type = unassigned DNA
atgctgccggaatccgacagcatgcgcacacaacccgaacaaaagaaggataccactttttccggtggtattcggtatttcatgaaggagaggtcaaacatcgtgagtaagaagtatgtttatctgttttcagagggcaatggctcgatgcgggaactgctcggcggcaagggcgccaatctggcggaaatgaccagcctgggcatgcccgttccccacggcttcaccgtgaccaccgaagcctgcacccggtattatgaagacggcaagaccatcgcccccgagatcgaagcggagatcttcgaatttgtttccaagctggaagcactcgcgggcaagaaactcggcgataaggaaaatccgcttctggtttcggtccgttccggcgccagagcctcgatgcccggcatgatggacactatcctcaacctgggcctcaacgatgaagtggtggaaggcattgccaagctcacccagaacccccggtttgcctatgatacataccgcagatttattcagatgtttgccgatgtcgtggcagaagttcccaaggaatacttcgagcgtgccatcgacctgatgaagcagaagaagggcgtcaagcaggataccgagctggacgctgatgatatgaagcagctggtagagcagttcaaggcgctctacaagggtcacatcggccgtgacttccccaccgatcccaaggtacagctcatggagagcgtcaaggcggtattccgctcctgggataacccccgtgccatctactaccgccgtcagaacggcattccctcgtcctggggtactgctgttaccgtgcagatgatggtattcggcaatatgggcaatgactgcggtaccggtgttgcctttacccgtaaccccgccaccggcgagaagaagttcttcggtgagttcctggtcaacgcccagggcgaagatgttgtagccggtatccgtactccccagagcatcgatgagctcaagcagctcatgcctgaggtttacgatcagttcctggagattgccacccgtctggagcggcactacaaggatatgcaggatatggagttcaccattgagcgcggcaagctgttcatgctccagacccgcaatggtaagcgtactgcccaggccgctatgaagatcgcctgcgatctggtagacgaaggccttattactgaggaacaggctgtcctgctggttgacccctctcagctggatgccttcctccacgatcagttcaatcccgccgagctcaagcgtgccaagatcctggctactgctctgccggcttctcccggtgctgcctgcggtcaggtagtctttgacgccgaaactgccaaggaatgggtagcggaaggcaagaaggtaatcctggtgcgcctggaaacctctcctgaggacattgaaggcatgcacatctccgaaggtatcctcaccgtccgcggcggtatgaccagccatgcggcggttgtagcccgcggcatgggtatctgctgcatctcctcctgcggtgacatcaccatccgcgaaggcgagcactgcttcgaggtggacggcctcatcgtcaacgagggcgattacatctccctggatggctccaccggtcgtgtttacctgggcaagatctccactgtgggcgctggtctcagcggtgattacagccgtctgatgggctgggctgacaagttccgcaagctgcaggtccgtgccaatgctgaaacccctgccgatgccgctcaggcttacaagttcggtgcggagggcatcggtctggtgcgtaccgagcacatgttcttcgatgagcagaagatcaaggctgtccgggaaatgatcctcgccaagacccagacccagcgccagaaggctgtggataagatgcatgtgatgcagcgtgaggacttcatcaaggtattcgaggccatgcagggccagcctgtgaccatccgtctcatcgacccgccgctgcatgagttcctgcccaaggagggcgagaacctggaagctctggctgcagagctggagaccactcccgctgctctggaaaaggccattgtagagctgcatgaggtcaacccgatgatgggtcaccgtggctgccgtctggctgtttcctatccggagatcgccaagatgcagaccgaggccattatcgaggctgccatcactgtaaccgaggctcataaggactggcggtttgtacctgagatcatggttccgctcatcaccgacctcaaggagctcaagtacatcaagagcatcatcgtggctgctgccgaggctgttctcaaggctcacgacagcgacctgaagtacatgatcggcaccatggtggaaactccccgtgctgctctgctggctgatgagatcgccaccgaggctgacttctactccttcggtaccaacgacctgacccagatgaccttcggcctgagccgtgacgatgctgcttcctacctgggcagctactatgacaagaagatctttgacttcgatccctttgctaccctggatctccggggtgtaggccagctcattgagcgtgccaccgaactgggccgctcggtgaagccgaacctcaagctgggcatctgcggtgagcatggcggcgatcccgcttcggtagagttctgccacaaggttggactcaactatgtatcctgctcgccctaccgtgtgccgattgcccgtctggctgcggcacaggctgccatcaagttcccccgggactaaggcatctccccgataaggcataataaaaatccccgtgcagtacgcacggggattttttgcgttccgggaagacccggtcaggacggaatcctggacgcctggcggaagaggatcagccccaccaggaagagcagggcgatcatgcccacgcccaggctgatattgccggtgatctgggagaccacgctcaccaccgtggtgcccatgaaggaggcacccttgccgcagatgtccagcaggccgaagtactcacccgactggctggagggaataatgcgggcaaagtaggaccgggacagcgcctggatgccgccctggaacatgcccaccagtaccgccagcatccagaactgcgcctgagtgcgcaggaacatggcaaagacggcaatgccgaagtaggccaggatacacagagggatcagctgatcgcccgaaaacttccgggccagccgtccgaacaggatggcgaaggggaacgccaccacctgggtgagcagcagcgccagcagcaggccggtgctgtccagtcccagggcttcgccgtaggcggtagccatgtcgatgatggtgtagacgccgtcgatgtagaagaagaaggccagcaggaagaggaagattttcttctcctgccgcacgctggcaagagtccggcccagccgtgcaaagctctcccggatggcatggggctgacgctcgacgaagtgcttctgctcataccggcggagcagcggcagggtgaagcccagccaccacagggcggtgatgccgaaggagagccccatggcagtgaccatggaaagccccagcgcactggagcccagcaccagagccaggcatccggcaaagggaatgcagctgccgatatacccccaggcatagccctgggaggatacatgatccatgcggtcggcatcggtgatgtccgagagcatggaatcgtagaagatcaggctgccggaatagcccacccgggccaccacgaagatcagaaggaaccagagccagtgggcggcaaagcccagggcgatgcagccaatcagtcccacgcccagaaacagcaggaagatgggctttttgtagccctgggtatcggcgagggtaccgaacaccggccccagcaccgccaccagcagggtggcagccgatgccgcatagccccagtaggccaggtactgcacattggaaagcccggcctcctctgccagaaagttgaagtagatgggaatgatggtggcaatgagcagcgtgaatgcggaattgcccacatcatagagaacccagctgcgctccgccggggtgagtttcagtttgttcatgcgtttgctgcctcctgttccggcttgggatcaaaggtgcgcccatagatggggtcctctgcctgaccgctctccaccacccggtcaaagtccccgatgagccgggctgccagctccgctgcctgatcgaaccgccggagcagttccgcattgctgtcctcacaccggggttccggatcagggccgaccaccagcccgcccagcttctcaaactgacctgccaggcgcagggcggtgaagatcacccagcgtttcagagccgaaggcgccaccagcagattcagataaaagaccatgccccggagggaatccaacacctgttcctgtgtgacttccgggaagaaatcggcgatcacggcggcattctcctccgacggcaccagatgtccggtggggcggtggcttgccgggtccagtccgtcccggagcatgagcgcccgctccagctccgattcgatccgggcatggctcaggccgcttgccgcctccttttccgccacatagtcatggctgagggtatccagcgcgaaatggcagaggaacccgtatacataggcccggtgtgccaggctgtccggatgcatctgcagcacccgggcggcccgctcaaaaaaatcccggcccggacggtcatggaattcatggcccaaccggctcaccggatttttcgagagaggcttatagtaaaagaacagatccgggccgtgcagaccgatggaatagagctggggatagcgtgtaatggcctccagcggctccggcgtaagcagccgggcggtttcccgtcccagacaaaagtgtgcgtatgtagatggcaaagtgaaatttctcctttccgacggcagatgccgcccgggaacaattccctggggtcatggtgccgtggggcagcacaccaatcgcctcccaccggaaacactttggcagctgtctgtgcgccatgacagctctccggctgtgatgccgggaaagcctcagcggaattgtatcatcgtccggccataaaatggatcatagccagtccttggttattatatcatttttgggcctgctccgtcacccgcacagcgtaaattgtgtgtaaacagaaacaaaaaagcccgccttaaaaaggcgggctttcatgctgtcagcacaaggggttcggggagaggtatcccgaactgtttctgccgggatttttacttcttgcccgaacgctttgccacaaagttggcgagcatgggggtcaggaaggaagtgataataaccgaagcggctacctgcgcagtggcaatgggagccacagctgcataggaggggtccacagcagccagagcgccggggttggatacaccgctggcggcggtgctggagattgccgcgccagctacgccgttgcctccggtgatcttatccatgaggatggtcacaccgcctactacaaagacggtgatcagacccagcaggataccggacagaccgccctggaacagctgctggatggacattccgcagcccagtgcaaagccgaccacgatgatggacggagtaacaccggcagagagagtctgcttgaaccacggggaaacattacccaggataatgccgaggatcaggggcagaatggagccgatgatcgaccagatggagatgctggcaagaccggcagagctcagggcgatcatggtgacggtggggccgacactcagcgaagtgatggcaacagcgcccttgacggcatcgtcgtcatactgggatacaatgcccgaatagagggcgttgttggcaaccgataccgcgctgatgattgccagcgaggaaagacccaggaagttatcgccgaagaggaaggccacacccaggcccaggattaccgacatggcaaccttggtgccgatgatgacagcaccgatcttgatggccttgggggtacttttaatatcgatggtagcgcccatgaagagcaggaatacaccaaccagtgcgctggtgccggtaaccataccggtgaagaagccgccgatctgcagcacctgcggtacgaaggaattgagcaccacgccgatgagcatcggaacaacgatggtatcaccggggaaacgcttcattttcagtttgctcataaccgtaaaactctcccttatgtgttagtccagaacgataccgccgtcgcagtcgccgatctcgccgtttacaaagcttgcagcatcggaagcgaagaacagaatcatctgagcaggctcgctcgggtcagcagcacggcccagggggatcatgccgattaccttggcgctcttttcagcgtcgtcagacagagccttggtcatgggagttacagtgaaggacgggcatacagcgttgcaggagatgccgtacttgccgccttccttggcgatggccttggtcagaccgttgacaccggccttggaagtggcataggcagctgtacccagcagaccgccgccgatcttaccggcaaccgacgatacattgacaatccggccgcccttcttctcgatgaagtagggatagatagcggagcaggtggtgaaggtaccggtgaggttgatgcgcagggtgcggtcccactcagcatcggttacttcctggaagggaacagtggatacaacgccgccgcagttgatgaggacatccacacgctcaaagtcgcccagaacctttgccataacggcacggatgttgtccttgtcgcccaggtcgatcttgtaaaccgagcagttgcccagctcttcagctgtggccttggccttttcctcattgaggtcgaggattacagcatgaccgccgccgtttacaacgccgcggacaacttccttaccgatgccctgagcaccgcctgtaaccagaactgtttttcctgtgaagtcaaacatgataaatgcctcctgtattcgttcccttccattcttcggaagggatcactttctttattttgttggggtaccgccctgccggcaaagagcgggttttcgattgacaaacaattaactatcaatcttctgcttaagattatagcattgcaggcatcgaaaaaatatggtatcatagcctaaaaagtgaagctgattttaggctgacagcacaaggaggaatcgctatggatgaacagctcaaatgggaactgatccaggccgcgctggatggagaggagctggaccggatcaccgaccgggccgcccattacctgggaagccccctggtggtcatctccaccaccagcaatatcatcgcccattccgcctccctcaccccgccggatgaaacctggctgcacgctgtggagcggggatatatcaccctggaatttgtggcgaccctggcgggctgggacaagcataaagatcacggcacccggtatgagtgcatcaccgttgccatcaacgaccggcgccggcggttctacaagctcaccatccattcccagctgctgggctatctcaatgtcaccgagctggacgggcatttcgatgcggtcagcgaggaggagtaccattttgtggcccagctcatcgccaaggaggtctatgcccggctcaaggggcaggacttctcccgcaaggcccgggacgaggacttcctgctggaactgctccacggcagctttgtgaaccggggccatttcatcgaccggatgcgtctgagcggcttcgatccctcggcccagtaccgggtgctctgcatcgagctgggagacttcctctcctataacgccgatgaagataccttcaagcgggatctgctggaactgctcccgggcagcaccatgatggtcagcgaccaggtactggtgatcctggcctccgaccggctcttcctgccggaacgggccccggcaatgctccggaatctggacagctacctccgctcccagaagctcctctgcggcatcagcgatgccatcggcgacctctactacttctccacttaccgggatcaggcgctcagtgctgcccgctaccgcaagtatctcatcgaccagtccctggcctatacgttctatgatgaggtcaaggtctatgatattctccagcagatcccccacagtgagctgatccactactgttcccggcaggtctatgagatctatcaatatgacgctgcccagcataccgactatatcaccaccctactggcctatctcaaagccaaccgcagcgtgaagtccaccgctgcctatctgcacgttcaccgcaatacggtcaactaccgcattgcccgcatccgggagctgtttggactggatctggacagcttttccactgtccatcaaatcctgctctcctgccagatgatccggctgctccaggattaacccccatgaaacaaaaaatggtgttgtttcccgccattttggggtttgacggcggctcggatttgtgtataatgagtatacaggcagcctgtaatttttttgagattgttactttgtgtatcacacagatgctgccccaggagggttattatgaatattttgattgttggctgcggcgataccggttcccagcttgccaatgtactggatcacatgggcaatcaggtatctgttgtggatcgcaaccccgaaactgctgcggaactttctgactcctttaccggtatgtttacggtgggagttcccattgaccaggatgtgctgcgtcatgccggtatcgaaggctgtgatgttgtaattgcggtcacccgggacgacaataccaacctgatggtcgctcagctggcccgggatatcttcggcgtgcccaaggtaatctcccgggtatccgatccccggcgggaagaggtattcagcagcttcggcctgagtaccatctgtcctaccaacctcacggttgcttcggtggtagccgcactggatgaccgccgcaaacataccgaagaagtttatttcggcagcacccggatctcctttgaacagatggagatcgaccgccggtatctgggtgaatttgccgaagccattgaactgcccaagggtactgccctgatcggtgttctgtcccagagcggcaagctgcggctgcgcggcgaaggcatgcagactgtcatcggtgaaggcgatgtcctggtactggcccgttccatcggctgatgaggaggatcaatcgagatgaatgttattgtagtgggcggcggtaaagtaggctattatctggcagaaaccctgctggaacatggtcacaagccctttgtaattgaaaccgataaggagatctgccggaagatcgccaacaatctggatattccggttatcaacggcgacggcaccaccctgggagccctggaaagcgccggcgtggaacattgcgatgcctttgtcagcgttaccggacaggatcaggtcaatctgatcgcctgtcagctggcaaaaaaacgctatggtgtggaacgcaccgtagcccgggtcaacaaccccaagaacctcaaggtaatgaagcgtctgggcgttgatattcccgtatccagcaccgacaacattgcccggctcatcgaacgggagatcgatgtggcaaccatcaagcgtctgctctcgatcaaccggggcgaagccaccatcagtgaggtggagatccccaagaattattcccgcaacggcaccagcctgatggacttcaaccttcccaatgaatgtgttatcgtatccatcacccgtggggacagcctcatcattccccgaggcaatacccagatcttttcgggcgataagctgattgtcatctgccgcaacgagtacctgcatcagctgctccatgccctgcgcattgaataggaggttccctctgtgaagaataaaaccgttctggtcaccggcgctgccaccggcatcggacgcagcaccgcggaactctttgccgccatgggctatcaggtggcaatcggctgcaaccactcctttgccgagggactgcagtttgcccgggccctgtccgaaatgggcatgagcaccatggcagtcaaggcagacctcagccagcccgatcaggtggacgccatgttccggcagatcgagtcggtatggggcggtgtggatatcctcatcaacaacgccggtattgcccagcagaagctctttaccgacatcaccaacgaggactggaacgccatggtgggcgtgaacctctcgggcgccttttactgctgccgggcagccctgccctatatgatccgccagaaggcgggcagcattgtgaatgtgtcctccatgtggggcatctgcggcgcctcctgtgaggtgcactattccgctgtcaaagccggtgtcatcggcctgaccaaagcgcttgccaaggaagtgggccccagcggcatccgggtcaactgcattgcgcccggcgccattgccacccgcatgaacgacaacctggacgaggaagcagtggccctgctccgggaggaaacccctctgggacggatgggcacaccggaagagatcgccaaggccatcgccttcctggcactggaggacagtgccttcaccaccggacaggtgctcagccccaacggcggactggtgatctga

SEQ ID NO: 2 - DNA, 13530 bp, unidentified
  source 1..13530: mol_type = unassigned DNA
atgcgggcggtctttcacggctggcccggaaatgatgaaacaatagataccgtcatgtttgatccaaatcaaaaacccgatacagcccgggcagaaaattccattttcggctctccggaagcagacaacctcctgcccaaggatcagttcccggattacgccatgcgtgcggaggacgccttccagttggtgtccgatgaattgatgctggacggcaatgcccgccagaaccttgccaccttctgccagacgtgggatgaaaagcaggtcaggatgctgatgaatatcagcattaacaagaatatgatcgacaaggatgaatatccccagacagccgctattgaaatgcgctgtgctgccatcattgccaacctttggaacgccagccaggatgaaaaacccatcggctgttccaccatcggttccagtgaagcgtgcatgctcgggggtatggccgccttgtggcgctggagagcccgccagaaagctgccggcaaacccactgacaagcccaacctggtatgcgggcccgtccagatctgctggcacaagttctgccgctactgggacattgaaatgcgtgaaatccccatgtcacccggaaaatggaagatggatgtggacagcatgctggaacagattgacgaaaacaccatcgtggtggttcccacgtttggcgtgacctacacgggcgcttatgaattgccggcggagattgccaaggccctggacgattatgaagacaggactggcatcagtgtagacatccacgtggacggcgccagcggcggtttcctggccccgttctgcgctccggacattgtctttgacttccgcattccccgcgtcaagtccatcagcgcttccggccacaaatacggtcttgctccgctcggagtgggctgggtggtatggagagacatcgccgacctgcctgaagggttgatcttcaacgtcaactatcttggcggtgaaatccccaacttcgccattaacttctcacggccggccggacagatcatctgccagtattatgacttcatccgtctgggcaaggaagggtataccaacatccatacccaggcctatgaagtggccaagtacatttcagatgaggtttccaagctggggccgtacgaattcatttgcacgggcgatccggaaaagggcattcccgccgtctgtttcttcatcaaggatggagccaagacgaactataccctcttcgacctctcggacaagctgagaacccgcggctggcaggtgcccgccttcaccctccctgccaattgccaggatacggtggtgatgcgcgtgatggtccgccagggcttcaccaaggacttggcagacctgttcctggaagacttcaagcgcatggttgatttcttcgagaaacacccggtcacttctccgatgactgcggaagaaggcacggccttccaccactcctgatggagaagctccgcataataatttttgttggatgaataagtgtgtgtaagcgcagctccgcagttgtcaaggtttgtgcgtggacctggcggctgcggagtttttttatgctccggcggttgcgccgcggatggcggaagcgtgatggaggcttctgttgcggatgaacgcggactgttccggaactgtttccgaaaggggctttgtgagacctggcggacttttccgttccccctccggaattcgcggaatgccgtttttccaagttgcttcgtgaaatcctgcgcgttccccgtcttcttataaaaaaccgggcattttgttattcctgcgtcttccgtttcgtttgggaaaaggcatgcttccgcaaggttccttgcatcattctttcggaagggtggggggggttgtagcgcgggctacggataaatgcggggtccacctgtttgaggcgccatctttacttggtgaaagattgctgcgtttcaaagcctggcgcgttgccgccatgtccggacaggcgggattgataaaaaccgtcctgttttttcatgccgccgggttgcagaccctgcggagattacggcaggggacggcgcggaggctgttgattccctgatctgcttacatgatgccgcgtcgcggacgcattgccggctggcagcgaatgatggattcaaaaaaattgtgcccgccgctttaacacgatcggcaaaaagcaagggaacaaccccggtcaggagtcttccatccatcctcacatccggaatgcagcgggaggcgtggaatggcgcttagctgatgcagcggtaatagtaatccacgcgggaaatgaaccaggaccatttgaaaccgggcttgccgttgtccagcagcaggtgggggcagcgttttccggtccagtagtaatgcggcacgacgttccgcagcgggatatcgtgggcgtacatgttgtaggcggccagcttggcggcgcggtcaaaggtcttgacgatgctctgtccccgcttttcgcacatttcaatgccgatggaatacatgtccccggggccgccccggtccgcatggcgtcccgtttcattcagggggatgtgctgcatggctacatacggatccaccgtgtagtgccagttgcagcgcagggctccgttattcagcgcgcgcgcgtgctgcatggcgtctgcggaagggttttccgtgttgtgcatggtgatgaagcgcggcttcatccgggaagagcgctgccggagaggggaagagcggggcatgaacatcggccggacgttgcattccgccagcagctgccgcggagagcgcttcaccacggggacaccggagggcttgaaggaaatcatgggcgccattccggctttgccggagggttccgaacaactggtcagggccagcagggcggcggcttccagcaggaaggttctgcggtccatgccctggactttctccagcatgggctggagctgtccggaaacacgggcaagataagtggcgatggtggaaatattgctcatacagcgaccgggaggtgggggatttacagcacggatgcgggaaaagtttagttcacgctaagattcacctttcttctttgcaacgaaaaagtgtgaaagctttagctttgtgccgaattcttcacgctttttgtcatattgggccgttcaaaccgttgttgagagcaaaacggtatccggttccacggcggtgacggcgtccgcatttgccggagacaggatgaattctccctgccgcgccgttttcccgtcccaggacacggagccgcggagaaccgtgaagatggagaagcgggaggcgtccggttgggtgaatcgttctccctggtccagccgatattcctccgtggtgaaatgcggcatttccgtcaggtagccgggttgccggcagagttcccggaattccgcgatggaatccagcgcctgttccatgtgcagttcccgtccctgtccggaagcgtctgtccggttccagtcgtaaaggcggtaggtggtgtcgctgttctgctggatctccgcaatgaggtgcccggcgccgatggcgtgaaccaggccggcgggaatgtaaagatgttcccccttttccagatgggtggagcgtatcagttgctccatttggcccgtttccgccgcccggcggatgtccgagagcgtagcggtttcttccattcctccgtaaatcagggcatccgggtctgcatgcagcacgtaccatacctcgtttttaacctctccccgccgtgctgccgccgtgcgttccgggggatgcacctggacggaaagattctcacgggcgtccagaattttgcagagcaggggaaaacgcgtaaaacgttcgtagccgggcccgaagagttcttcccgctgttcttcccacagccggtgcaggggcattccttcccattcgccttcccttaccgtgctcatggcttccggacggtcgctgatttcccaggcttccccgtaggccgtttcccggtcgggcagttcccggcccagcatggttctcatgtgctggccgccccagatgcgcggctgatagatggaatggaatcgaaaaggctgcatcgtaataacgggagcgtaggccatcttttacggccggacaagtaaaatgcccgcaggaggcctgcgggcatgaagagagggaaatcggggagtttccggttatttgatggattcccatacgatgccgatctcatcaaacggcacatattccttgttcttgtccggtttcggcacaccgtagttggtccggaacaggggcaggatgggcgctcccgtcttggggtccttgctcatgggtgccattcccacttcctccagcagcagggtcatgccgaattcgccgccgggaccttcgctgaccaggatttcaatggggtacaccttgccttgctccaccgtgaactgcttgccggcggctacgccgcgcatggtgttgttccagtggccggaggggccgtatttgtagaacgtgacgggggggacgttgatgcccgcgtccttgagttccttcttcaggtcgtcgttgccgggcttgccttccatggcatcaagccatttggcgttgttcgccgtcattttccccagggaggcggattcccagccgtagtcgaatacgttctggttgttgaaccgcactaccaggtagtcgtctcccagccccacgaagcggaacgtgccggatttgggagcgcgcactttgccccggtaaatggcaagccactggctgggtttcaccttgtcgtcgcatccgtaggccttgggcgcgtctttggcgggagttctgggaatgtagaactgggcggcgtacaattgctgcggcgccttgtaaaaacgattcagctccgactcattccagcctttgttgacaaagcgggaaagaaaggcgcggtactggtccatcgtcatgttggtgggccgtccgccgggcgtctgcttggtatcgtaaaaggtgcctaccagcgtacttcctgagggctgggacgtgccgaaggcggaggtggcgtcacccaggtcggggccgaagccgtcccccatgcccagagcggttccttcttccagcatgacgggttcgtccggcgggtcaatgtcgatcttggggaggctgaccggggctgccgccgcggctaccacgactttgacgggagtttccgcatgggaggaagaggaggtttccctctgcacttccggcggcggaggcgtatccgacggaggagcttcgtccggcgtgatgtagccgacgaccttgggttcttccgggggggcgatgatgatggtcagggagtagagaatggctcccgccaggacgacggagagaatggatgtcgccaatgcggcaatgtaatttttccgcctttccttgcgcagggtttccactgcgtcttctgtgggttctatatgaaggctcatgcatgtatgataacataggagccccatatgttgagtaacatgaggataacaaggataacatgtcggtaacaaaaagggcgtctttgacgccccttcttccttatggcttctcagcttttcctgcgctttcccgtttttccgggagccagtgcgatggcaagaatggaacagacgcccagaatcagggggtaatacaggtattccatgatcagcaggggggaaacctgggcgattccggcggccatgagcatctgggccccgtagggaatgacgccctggaccaggcaggaaaaggtgtccagaatactggcgctgcgcctgggcgggatatggaatttatcgctgatctccttcgcgatgggacccaccgtaatgatggcgatcgtgttgttggcggtgcagagattggccagggagaccaggccggcgatgctgaattccgcgccgcgcctgctccggatgtgggccgtgatttttccgatgatgtacgcaatgccgccgttgaagcggatcaacgccagcacgccgccggccagcagggtgacgatgatcagctcccccatgccggtcatgccgctgcccatggcgcggaaccaggccatgaaggaaaaataccccatgcctactccgacaagtcccgtggcgagcagccccagcgtcagaacggccatcacgtggactccggccagcgccgtcaccagaaccagcaggtaggggaacaccttcatccattcaatgggagcgtccgccatggagggggactgcacgttccatccgagcaggatgtagcaggccagggccagcagcgcggcgggaagcaccaccttcacgttagcccggaatttgtcccgcatggcgcagccctgcgtgcgggtggcggcgatcgtggtgtctgaaatgaaggaaagattgtctccaaaaaacgctccgcccaccacaatggccgtcatcatgccggtgctgacctgcgtggcgtgcgccagtcccgtggctacgggagcaagcgccacaatggtgcccacagaagtgcccacggaaagggagatgaagcaggatgcgatgaagacgctggcaagcagcagattgtccggcaggaggcgcagcgtgagctgcacggtggcgtcaattgcccccatgtccctggcggactgggcgaatgcgcccgccagcacgaaaatccagatcatcatcaggatattccggttggctacgccggaggaaaacaggtccacccgttccgccatgcttttcccgcgggtgatgagcacggcccagactgccgccgccgtaaaggccaccgtcaccggaacggcgtaaaaatcctgtacggctacggagatgaccaggtaaagcaggaagaaaaccagcagggggctcagcgcccacaggctgggtttgacgggcgccgtatcctggctgtctggaaaatgggtcatggggagtgcgtgctgccggagatgctgggcggcttagtttccggcggcttcctcttggtccagataccaccggtagatgcgctccacgccttcttccagctccacccggtgtttccagcccagggaatgcagcttggaaacgtccgtcagcttgcgcatggtgccgtccggcttgtccgcgttgaataccagttctccccggtagccttccgtgacggctatcaggcgcgccagatcgccgatggagatttcctttccggtgccgatgttgatatggcagttccgcacctcccggtcttcccctttcagctggctgaaatccacctgttccatcacgtggacgcaggcgtccgccatgtcttcgctccacaggaattcgcgcaggggcgtgcccgttccccacagttccacggaaccgggggtgatgccgtatttggccagcgcggccaggatggcttcttccggcgccgttccgtccacctgttccacaggccgcgcgtccaggtctttccggacggcgtcccagtccccttccatcaggcgcttggccaggtgaatcttgcgcaccatggcgggcagcacgtggctgttctccaggtggaagttgtcattggggccgtacaggttcgtaggcatcacggcgatgtagttggtgccgtactggaggttgaagctctcgcacattttcaggcctgcgattttggcgatggcgtagggctcgttggtgtattccagcggggaggtgagcagggcgctctccttcatgggctggggtgcctctcgcggatagatgcaggtgctccccaggaagaggagcttggatacgccgtgccggaaactttccccgatgacgttctgctggatctggaggttgcggaagataaagtccgcccggtaccgtgagttggcgataatgccgcccacgaacgccgccgccagaaagacgtattccggcttttcccggtcaaagaattcccgcacggccgccgggtcctccaggtccagttcccggtgcgtccgtccgatcaggttggaataacccctctcttccagggatttccagatggcggagcccacgaggccgcggtgtccggccacgaatattctgctgtttttttccatctcaggaattgacgggatttttgacgtattccatgtcgtggcggaccatgatgcgcacgagttcctcaaacggggtggaggtggggttccagccgaggagggttctggccttggtggggtctcccagcagttgttccacctcggaggggcggaagtacttgggatccacttccaccaggatatggcccgtcttcttgtcgcgcccgcgttcttccacgccttcgcctgcccattccagctcaattccggcttcacggaaggccagcgtgcagaattcccgtaccgtgtgcatttccccggtggcgatgacgaagtcttccggcttgtcgtgctggagaattagccacatgcattccacgtaatccttcgcgtagccccagtcgcgcagggcgttcaggttgcccagataaagcttgtcctgcatgccctgggcgatgcgggccgccgccagcgtgatcttgcgggtgacgaagttttccccgcggcgttcgctctcgtggttgaacaggatgccgttgacggcgaacatgccgtaggattcgcggtaattcttggtgatccagaagccgtattgcttggctacgccgtagggggagcggggatagaacggcgtggtttccttctggggaacttcctgcaccagcccgaagagttcggacgtggaagcctggtaaatgcggcatttcttttccatgcccaggatgcggacggcctccagcatgcggagggtgcccacggcgtccgtttccgccgtgtattccggcacgtcaaagctgaccttcacatggctctgggccgccaggttgtagatttcatccggctgcacggtctggatgatgcggatcagggagctggaatccgtcatgtcgccatagtggaggttgatcagccggtttttcttcatgtcccgcacccactcgtccaggtaaagatgctcgatgcggcccgtgttgaaggaagaggagcggcgcaggatgccgtgtacttcatagcccttgtcaatcaggaactctgcgagaaaagaaccgtcctgtcccgtgatgccggagattaatgcgattttgctcatgtgctgtgtgtaggtggtttgttggcggaggaggttgaagaataaatggtgaaacctccagcggagccgcagttgatgcgctccgggcataaatagcgcatttttcccatggtgacgaggaaaatgctctggtcatggaagaggaatgccactgtcagcggacggcttttcctttgccggacgcaatcatttccttgaaatcccggaacaggtactgggggtctctggggccgggggcggcttccgggtggtactgcacgctgaaaacggggagcgttttgtgggcgatgccctccacggtattgtcattcaggttcatcagcgtgatttccacgtcgtccggcacggtatccggatccacggcaaaaccgtggttctgggacgtgatgctgattttacccgtgcggaggtccttcaccggatggttggcgccgcggtggccgaacttcagcttgaaggtcttcgcccccagcgcgtgggaaatgatctggtgccccaggcagatgccgaacatgggaaccttcccgatcagggcggctacttcacggtggatgtccgtcagcgtggcggggtcccccggaccgttggaaagaaaaacgccgtccggcttcatgccaagcacttcctccgccgtcgtgtgggcgggaaccacggtcacacggaagccgttttccctcagttggcgcaggatgttgtacttgatgccgaagtcgaaggccacgatgtcgtactccgtggggggcagtaccccttccgtcaccagcgcgtccacttcctccggggtcatgggatgggagccgatcttgtctacgatgttgcagccttccatggagggggcctttctggcggcttccacggcttcctccggcgtcagctccgtggtgaggcaggcgcgcatggcgcccgcggagcgcaggtgcttggcgatcttgcgggtgtccaccccttcaatgccgatcacgccctgcttttccagccacgggcccagggcttccgtggcgcgccagttggaaggaaccttcgccagctccgccaccacgaagccgctgacctgcgccttgccggactcgtaatcttccgggttgacgccgtaattgccgatcagggggtaggtcatcgtgacaatctggccgctgtaggacgggtccgtcaggacttcctggtagccggtcatggacgtgttgaagcaggcttcccccacttccgtgcccgtggctccgaagtgcgaaccgatgaagacgcttccgtcttccagtgcgagaatggctctcatgatgatataaaaatgctgtttggtatggggttaaacggtctgggcatggtattcctggatggtgcacacctggaggttcctgttcttcagcgcctcaatggcgttcacgcaggcctgtgcggaggccaggttcgtgcagtaggaggttttggcggcgatggcggaggaacggatgatgatgtcgtccgcccgcgcgtcgtgggagccgggcgtgttgatgatgaaatcgatgtccccgttcttgatgtggtccacgatgttcgggcggcgcgcctcgttcaccttgtacgcgcgttcgcattcgatgtcgtgctggagcaggtggatcatcgtgccgcgcgtggcgcacagcgtgaagcccatgtccgccagctggcgggccatgtggagcacgcgctccttgtcccggtcattcacggagatgaaaaccttgccttccgtcggcaggggattgaatgcgctgatctgggatttggcgaaggcgatgtccgggtccgggtcgatgcccatcacctccccggtggatttcatctccggccccagcaccacgtcgatgcccgggaagcggccccaggggaagacggcctccttcacgcagtggtattccggcgtgatttcccgggtaaagcccagctcctccagcgtcttgccggccatgacctgcgcggccagcttggcgaggggcctgccgatggccttggagacgaacggaacggtgcgggaggcgcgcggattcacttcaatgacgtaaagctgttcgtccttcacggcgaactggatgttcatcagcccgcagacgttcagccgccgtgccagctccttggaggcgcgcgtgatttccttgtgcattttcatggaaatgcccatggcgggaatcatgctggcggaatccccggagtggatgcccgcgggctccacgtgctgcatgatggcgccgatgacggcccgctcccggtccgcgatgacgtccacgtcaatctccacggcgttttccagaaagcggtcgatcagcacggggcgttcctcggaggcctccacggcttcgttcatgtaccggcgcagctcctgctcctcgtacacgatgatcatgccgcggccgcccagcacgaaggaggggcgcagcagcaccggatagccgatgcgggcggcaatagcggcggcgtcctccacgttggtagccgtccccgcgtccgcctgcttcagccccagctccctcagcagggcggagaaatgttcgcggtcttccgccaggtcaatggccttcgggctggtgccgatgacgggcacgccgtgggcttccagggcgttggccaggttcagcggcgtctggccgccgaactggacgatgacgccgtccggcttctcctgctcgcagatgtggagcacgtcttccagcgtcaggggttcaaagaaaagcttgtcggaggaatcgtagtccgtggagacggtctcagggttggaattcacgatgatggtttcataccccatttcccgcagggccatggaggcgtgcacgcagcagtagtcgaactcgatgccctggccgatgcggttcgggccgcctcccaggatgaggatcttcttccggcccgtgtcgcgcgcctcgttttcatccccgtacgtggaataaaagtaaggcgtgtatgcctcaaactccgcggcgcaggtgtccaccaggcggtagccgggcacgatgccctgttcgcggcgttccttgcggatgctttcctccgtagttccgcgggccagggcgatctgcctgtcggaaaagcccagcttcttggcttcccgcaggtccagcgcgtccaggcggtcgcccgccttcgccaggtcccgcatctgggccaggaaccaggggtcaatctgggtgagctggtgcacctcgtccagggaaaagccgctgctgaacgccgtctgaatccagaaaatgcgttccgccgtggggacggccagcttccgcgtgatttcctccgcggtgggcttctgcggcgccttcgcgtcgaaaccccagccccagcggcccgtttccagggagcgcagggccttttgcagggattccttgaacgtgcggcctatggccatggcttcccccacggatttcatggaggtggtcaggtgctcgtccgcctgcttgaacttttcaaacgtgaagcgggggaccttggtcaccacgtagtcaatggtgggttcaaagcaggcgggcgtttccctcgtgatgtcgttgcgcagttcgtccagcgtgtagcccacggccagcttggcggccagcttggcgatggggaaccccgtggccttggaagccagagcggaagaacgtgaaacgcgggggttcatctcaatgacgatcatgcggccgttggccggattgatggcgaactggatgttggaaccgcccgtttccacgccgatctcccggatgacggcgaaggaggcgtcccgcatgacctggtattccctgtccgtcagggtctggatgggagccacggtgatggaatccccggtatgcacgcccatcgcgtcaatgttctcaatggagcagatcaccacgcaattgtccgcgcggtctctcatcacttccatttcaaactccttccagccgatgagggattcctcaatcaggatttcggaaacgggggagaggtccagcccgcgggcgcagatttcctcaaactccgtcttgttgtacgccacgccgccgcccatgccgcccagcgtgaaggcggggcggataatcaggggaaaggtgcctatgtccccggctacccggcgcgcctcctccatcgtgtgggcgatgccggagcgcggcacgtccaggccgatgcggatcatggcctccttgaacaggttgcggtcctccccgcggtcaatggcgtccgcatgggcgccgatcatgcgcacgttctccctctccagcacgccgctgcggtggagctccatggcgcagttcagggccgtctggccgcccagggtggggagcagggcgtccggcttttcccggacgatgattttctccacgaactccggggtgatcggttcaatgtaggtgcgcggggcggtctctgggtccgtcatgatggtggcgggattggagttgaccagcactacttcataaccttcttcccggagggccttgcaggcctgggtgccggagtagtcgaattcgcagccctggccgatgacgatcgggccggagccgatcacgagaatctttttgatggaggtatctttaggcat

SEQ ID NO: 3 - DNA, 13696 bp, unidentified
  source 1..13696: mol_type = unassigned DNA
atgagacccttgaaaaccatcgtcgccggaactctggccctgctggcggcagttcccctgtcagcccaaaccagggccgcggaaaataagaaaccgaacatcctctttatcattacggacgaccacgcctaccagacgctgggcaccggcaaagacgattcccccgtcgccctgcccaacttcaacaaactgggacgccagggcatggtttttgaccgcagctactgcgccaactccctgtgcggcccctcccgcgcctgtatcctgaccggcaggcattcccacatgaacggctttgtcttcaacggccagaaaccgctggacggctcccagcccacctacccgaaaatgctgcagaaagccggataccagacgggccttttcggcaaatggcacctggaatcaaatcccaccgggttcgacacgtgggaaatcttccccggccagggcagctactacaatccggactttatcagcctcaagccggacggcaaacgccagacaaagcgttttcccggatatgccacggacgtggtcacggacaaatccatccagtggctggaaaaccgggacaagaacaagcctttcctgctcgttgtgggccacaaggctccccaccgcgcctggtgccctgctctgcgccacctgggcaaggtggacacttccagcatgacgccgcccgccaacttccatgacgactatgccaaccgtccggaattcctgaagaaaaaccagcagacagtcgccaatcacatggcgatttattccgacctcaaagtgcttaaggaccaggttccggaagaaatgcgcaaaagcatcgtttcccccggttacggctgggacctgggcgagttgaaccgcatgactccggaagaaaagaaaacctggacggactattacgccaagcgcaccaaatccctggtggacggcatgaaatccggaaaactgaaggacccgaaagcgtttgcggaatggaagtggcatgcctacatggaggattatctgggatgccttctgtccgtggacgacagcatcggccgccttatggaatatctggacaaagaggggattgcgaaagacacgctggtcatctactgcggagaccaggggttctacatgggagaacacggcatgtacgacaagcgctggatttttgaagaatccctccgcatgcccctcatcatgagatggcccggcaaaattcccgcgggcatccgcaacaacaccatggtgcagaatatcgactacgctcctaccatcgtttctgcggcaggggcggacaccccggaaaacatgaataccttccagggcgtatccctgcttcccaccgctttcacgggcaaaactcccgacaactggagggatgccatttactactgtttttacgaaaatcccggcgaacacaacgccccgcgccacgacggcatccggatggaccgctacacgctttcctacatctggaccagcggcgaatggatgctctttgacatgaaaaaggatcccatgcaaatgaaaaacgtcattgacgatcctgcctacaagactacggtggaacagctcaagaagcgttaccacgaactgcgcaaaacctataaagttccggaaaacagccccggaggcaaaggaacgcctatccccaaattcgacgcttcctggtaaaagccacacgggaaattgcctttccaagcgccggtttttccggcgcttttttattttcgtccatagcaggccggagaaatccgtcacggaggccgaaacaggcaaactccccttccgcacacaaccgtccatcaaccgtaaaacccgcggaggggtctcaagcccgccagcttcatcaatttattcatggctttttcatacaggaaaaacgcctgttgcatgcagcaaagcacgggcattaagggatgctccgctttctttgcgccaagctcttccaaaaaccagtccgggtctttgtcgtcaaaaccgggatgccgctcaaacgcccggcggccttccagatgaatgacgcccttcccggaatacaggcagtccagatgatgttgcgccgccacgagagacagcagcgtctgatcgtgcgtatgagctacaaaattatcgcggcaacggctctcttcttccgtagtggcagaagacaccaatttgaactgacggcacaaatccatccattcacggagaattcggaggctttgttccgattttttcaagaaaaggaaggagccctgaatcaggggagcctgttcaaaagacccgctatccagcttcaattcatcaaaaacgctctgcttgcaccaccgcgtaaggcctcccgtataataggaaatattcacgcccggcatcatatcctgccccttctcccggagccattggacaaacggctccaaggaatgatggaaaagcctccccggcgggcgccccgcatccgtataaagcaggtaatccccttcctccaaatgttccagctccttaagaatgatgaagggtttccatacccaaaacccggcaccctgtaaattcgggtcaaaccatggaatagcctccctgattccttccctttccaggcgattaagattccaacaggacaactccactgaggaatccgccagcctcaggctcatcatctgcatccattgccgcaaatgatagccgcgggtcgcgaaagaacaataacggatagccatactcccagattccggtggaaaccatgtccctaaaaacgggaacacatcttctgcgtccgcacctataacgagttgtaaatccgctgtcaatggaaaactttaacggagaatcatctccgtgcatggaaccacggattgaaacaggatttttttaattaccaaaaaaccattcaacacgataagttatttatagttatttttttataactatatccaaacttttttaaagacaggcggatttacaatcccccgttcaaatacaccacaatgtccagaatttgacttatccccgtgtcatctgctccgcagccagccttttatccaaatcaagggccgcccccatggccgcatccatattgtagtattcccactccgcaaaacggcctaatagataaatgcctttcggttccaggcactcctttagttcccgtatgagggttcggctggaaacatcctgaacgggataggtatattcttcccagtgatgggccagatacacaggggaaaagggaataagctccagctggcgactgatttccccttccgtcatttgctcggaaaattcaatagtcgcggtggtgatgtccccgttattattatttctggaaaaattccccgtgcaaatgatccggtgagaacggtgggatggagagggcatgtaaatccagctgtaatcattgggggaaatccggcaaagcacggaagtggttccgtgagagcgcaattctgaaatccgggggaaaaacgggcgcaattcatccatgcagggaaaacaatccccaagctgcctgacattccccgtaaagacaactctgtcaaacaattctccctgtacgagccatttcccgtccttcgggaggatatttacagcttcctgccgatacctgaccttgaggccgcgagccagcgtatccgccagaaactgggaaccgccgtttttcgcataaaagaaagaactgtgcaccatggcgctttcattgatgtgcccaatattgttcaacaggatttccgccacgctcggcatgggaagcttgtcttccagccaatccatggcaatttggctgatatcctgcctccacactttgttattgtacggcgtaaaataaaggctgttcagggtttttccgaaacggttcagaaaaaactcacccagggagcggggctccgcgggaggattcctgtaaagttccagcagctcatggacgatggaggaacggacggcctcaggaaactggtcgaggtggttctcaatgggataatccaccacagccccgccctccagggaaataacagcccgtctccgggcggaaacaaaatcgcgctccctgtcaaaccgggaccaaaaccagtccagcacttcctgccgccgggaattgaacacatggcctcccacacgatgatacaggttcccctgtacttccgtgcatttaatcaggccgccgggccgggagtccctctcataaacgactacctcatgccctttcttcagcaacattccggccatggacaatccggaaaccccggctccgatcacagcatatttcatcatgggataaaaaaacaatttatggacgccactatctggcgaaacgggacaatttcacgggatggagatacaggtattcctccggaaaggaggcaagcagcttgccgaggtctcctccggaagaggacacgagcccgtcaatgacggcattcatggcttcaaagtgttccggatcctggggaaaccagacgtttcccgacttgtactgcgtgtcctccagcgtagacagctttgttccgggaagaagctgcaacaccgtgggaatagccagctccacaaacatgttccatgcggagaacacttcaaggatacggcagaaatcgtctaatttccctttcggaatgcagacaatgtccgaatatccgaaaacgacaggataggaataccggtattttttaatccggtgcttccagtaattcagcaaatgccataccctgcccttcaacactttccaattcgcatgaatccccccggggctccatttgggcagaaacatgcgtacgcgcgacaattcatcatgccgcatgaggttcctggattttaaaatccgcctggcctcctcataggacggaacgttcctgttgacgctttccgcatcaataccgggaggggttatggaaaaatggtgggcttccgccgttccccggtaacacaccggcagagaaacgtccacaaaaccgtcaaggtaacacgtatcctccccatggattcccagcagggacggcgttgaaaattcgtcaaacctgggatttaaaagaagatcgtctccgatgataagaaaataatcgccctccaactgcctgattctttccctggactgcaaaatataattatagaactggaaagaattcccgaagacggaacatacgtcaggggcatctcccttgtagtagggcattaattgaagcaacccggaaaagcgtcttgaataaagctctctgattaccggaatgttacgttcatactgatggttgaacaatacaacaagagacgttttccgggaagaagtatccatggccgtttgatgttgagaaacaaaccgtacccttcaacataaattattgaaaaaaaggaatttgctctctgagtgcacgcacagtaaaaagagtgcggggcatattacacggattccaaatccggagtcaaggttaaattttgaaagaaaggaacttctgaaaataagcttccccaataaccggaatcttccgtcttcatgattccatccgggtaaccccatcaattcccattccggcagaaacatccatacctgccggaaagtccgtatttcaaagaaaattattgatcatcagttttatttcctttctgcgaagaggctctcctgtcatgcagaaacaaccgcacgcaatctctttttaattacagcggatttggaattccccaatcgaatttggaattcgttatttttagacagtttaaaaaaacttaaactgtttattcgatttcatgatttcagccattcttctttgttacaatcagaaacgttttatcaaggaacagttccgggctattttaaaacaggattatccaggagaatgggaaataattatttcggacgatttttctcaggacggttcttttgaatgcctggaagaaatggtggaaaaagagggagaaggacggcgtattattctccaccgtaacgaaagcaaccggggaattgcagggaatttgcaatgtgccgttcatttgtcccggggggaatggattatcaagtttgacggcgatgacatcgcacgagaagacaggatctcctcgttggcatctctggcggaaaaatatcccggtcatctggtttactgccattcttataatgaaatcgatgaagatggacaacccgcttatggacgcatgttgccagattcagattccgtcgtcgtcaaaccctacagggaatgtatttttgacatttcccatgtttacagctgttttggcggaaatgccatgtaccacaggtctttgttcagcgacttcgaatatttgccttcaggccccggcattgcggacgatacaatgctgtccatgcgcgcctatttgaaaaaatcaggcatggtcgcatccggcaaacggtgttcgtactatcggagacacaacagtaatatctgcaattttaagagcgggaaccccaggacaatcctgatcaagagatcggaattcctgataacaacctggataatgatcatgaaagaggtatacggaaagcataagtccggggaaataacataccaggccgccgatcgcctgatgaggctgattcaggcggaacagagaaggctcctgctcttcccctatgcttcattcgataacagccttcttaccaaactcaaatggttttggaacattctgcaatgcaggccgaggctctggctggtcagcattccaagattgctcccgttttgcctgctgcaaaggtatttgaacattaaagaccggataaaaagtcttcctttttttcactaacagcagggaacctgcataaaaaacaggaaaaaaaataaacgtaccgttatcctgcttccctccatcatcgggaaaacaaaaaagccgttccgccggacaggcctgcgcggaacggccaggaaaagaaaaccttgacaaggttaatacctgtaaaagtccggcttgtaaggaccttccaccggaacgccgatgtagtccgcctgctccggacgcaggacagtcagcttgcaccctatcttggcgaggtgcagccgcgccacttcctcatccagcaccttgggcagcacttccacgcccacggaacggtctttacgggtattccacagttccagctgggccagcacctggttggcgaagctgttggacatcacgaagctgggatgacccgtagcgcagcccaggttgaccaggcggccttccgccagaagatacaggctgttgccggacgggaacgtgtagcggtccacctgcggcttgatgttaagatgcctgatgccgggatacgtctggagcttgtgtacctggatttcattgtcgaagtggccgatgttgcagacaatggcctggtccttcattttttccatgtgttcgatgcggatgatgttgcagtttcccgtagtggtcacgtaaatatccgcccagcccagcgtgtcttccaccgtcagtacgcggtaaccttccatggctgcctgaagagcgcagatggggtctatttccgtcacgaccacctgggctcccatgccgcgcagggactgggcgcagcctttgcctacgtccccgtagccgcagacgacggccaccttcccggcaaccatcacgtccgtggcccgcttgatgccgtccacaagggactcacggcagccgtacaggttgtcaaacttggacttggttacggaatcgtttacgttgatggccggaatcagcagacggcctgcatctggtacaggcggtgcacgccggtggtcgtttcctcggaaacgcccttcagctcgggaagccagcgatggaaaatgcccggagtcgccgcggcaatttttttcaacagggccttgacgacttcctcttcttccgattccgacggggtatccacccagtcggagccttcctccatttcatacccgcggtggataagcagggtggcgtctccgccgtcgtccacaatcagctgcggccccagcccgtccggaaagttcatggccttccacgtgcagtcccagtattcccgcagcgtttcccccttccaggcgaagacgggggtgccggatttggcgatggcggcggcggcgtggtcctgggtggagaaaatgttgcagctcgcccagcggacggaagcgcccagagccgtcagcgtttctatcagcacggccgtctgcaccgtcatgtgcagggagcccatgatgcgcacgccctccaggggcctggctgcagcgtacttttcacgcacggccatcaggccgggcatctcatgctccgcaatatccagttccctgcgtccgaaatccgccaggccgatatcgcgcaccttgtattgttccgtttctgaaaacatgtctgtaagcgttgtcgtaggaattaatgaagaagttgtttcagggaggccaggcgcgtttcgtccagctgttcccagggcagctccggattggtgaaatgcccgtagtgcgtcgtcttccggtaaataggccgaagcaggttcagctgttccaccatatccgcaggcttgaaggaaaagatgttttccagcgcatgttcaatggatatttcctccaccttcccggtaccgaacgtatccacccggatggaaaccggagcggggtagccgatggcgtaagccacctgcaattcacatttatccgccagtccggcagccacaatgtgcttggcaacccagcggcacatatacgcggcggaacggtccaccttggacgggtcttttccggaaaaggctccgccgccgtggcgccccatgccgccgtacgtgtccacaataattttgcggcccgtcaggccggaatccccgtggggaccgcccacgacgaatttcccggtggggttgatgaaatattccgtcctctcatccagaagctccgcaggaagcacatttttaatgagtttgacgcaatatgagtaaatcgtgtcatggtccacgtcttccgtgtgctgggtggaaataactacgttttcaatatgcgcgggacgcccgtcttcgtcataggccacagccacctgggacttgcagtccggacgcagccagtccacatgcccgcgtttgcgcctcctggccagctcaatgagcagtttgtgcgcaaacacgatgggggccggaagcagctccggcgtctcattcgttgcgaagccgaacataatgccctggtctccggcgccctgctccgcatggcccttgccctccgcctcccgggcgtccaccccctgggcaatatccggggactgttccgtgagcagattcgtgaaaaagacggtatccgcatggaaaacgtcgtcgtcctgcctgttgcagtacccgatctcccgaatggcctggcgggcgattttttccggatcgatcaccgccttggtcgtcagctctccggcaatgatgaccatattgctcttcaccaacgtttcacatgcaacgcggctagttttgtcttgagccaggcaggcgtctaaaatagagtcggaaatgtagtcggccaccttgtccggatggccttctccaacggattccgacgtaaagatgtgaggggtgtttctgctcatatcgataaatctcgatgtgttgatatattattccgctatgaagtcaaccctaaaaacgctcaaactcctggcagatcccacccgcctgcgcatcatcaacgttctgaatgaagaatccctgagcgtcgcggaacttcaggaaattctcggcatggggcaaagccgcatctccacccagctggcccagctccggcaggaaggggtggtggaggacgcccgttccggcaaaaacgtcttttacactctttccctggcaggcgatctgcacaacgtagccctgaaagcctgcgaggaattgccggaggcggaaacggacaaaaaagcccttcaggttatcctggacaagcgcaaaaaccgcacccaggcctattttgacgaagtagtgtgccgtctgggcaagaactacgcgccaggccgttcctggaaagcgctggccggagctctcctccgcattctgaactatgacgtagtggcggacctgggagccggggaaggtttcgtttcccagctcatctcccccagcgccaaacaggtgatcgccgtggataactcccccagcatggtggagctggggcaggagctggcgcgcaaacacgggctggacaatctggaataccgcctgggcgatatcgaagcgccgcccattaaacccggcacggtggatctggccctgctcagccaggccctgcaccatgcgcaaaaaccgtccagagcgctggaagctgcgtgggatatcctgaaatccggcggttgcctggtggtgctggatctgctccagcatggacaggaggaagcccgtgaactttacgcggaccgctggctgggcttcacgcccgccgccctggaaagcatgctgaaggaagcgggattccggaacatccacacggatattgtggacagggagccggacccgccccatttccagactctgatggccgccgcctggaaaccctgacgtacagccgtcttaatccattttccttccggaatagccggagcggacttccggcatgcctccacaagattcctcacggtaccggcatgccatccatgaaaagccgctacatcccggaaaccctgtcttccggaggcctttccgctggaaaggggcggcttccggattgcagggcttcccgcattccccggacaatatccatcatctgtcctgcagacagctcctccttcccctcaatttcctcatccaccatcgctttcatttcctccagcagatgctccggttccagacggtaagtaagcaacacccggaacagttcccttccggcagcctgcaaagggaccgcaggaaaatccgcgacacttttcaaatctttttcttcaaaggaattcaggagctttgcataccgcaggaaagcgcgcctgaattcctccgggcatccgtccatatccactgaagccaaataccggcggaaggaaatctccgccgccagatgcacggcctcatcccccgtggattccgccagccacgtttccttttgcttcagatgcacaagcaggaggaccttcctcatggcctccctctgtctgcccttggggccacttttcagtttgaccaggtccaaatccagatccgcggcatcggggctcgccacatcctgggcgggagacacacccagggaagccgccattatgacaaacggcagccacctcctcatgcattcccgaatatggaccattgcggtcagccattacatgaaaaacgccggaaaatcaacccaaatccagcgcctccggcatgaagaaaatccatgccggaatgttgtgcccgcccagaggaacacccggaaccgcagatcattccgacataagcgccatcccaccgttttccaagcgttccgggcgggaaaagaaggaaaaaacgatgtccgcatccgcacccggctgttggccgggaaggacggcttcatgccagccggagagattgacggacacacgggcatatgagaaaaagccgtctatgctattcgcagtagtgattttcctttccgtggtcgtgctcggtgtcattgccgcgctgcgtttcaccaaaggcatcattcccctgcgcacctacgaatcccgggaactgcccggtttccccggcccggcgggattaatccaccgcctggacggtgcggaaaaacgccagcggaaactggagaaagcccggtttcccggagtggatgaaaacggattcatcagccttcctccggcatgggaaggcaaggtgaccgcaggccggctggcctgcgtagcccatacctgggccatgagcagcctggtccgggaagacccggaggcggcaaaagcccgcaaaaccgcctctgcgcgcgccacgatgattccctttttcacagctcttatcctgctgggaatgctggcgaccggactgttgaaattccagatcgcgctggccatcgggctggcctgctgggcctttttcactttctccgcccttcccacccagttccgcgaatggaaagcggcggaaatagccaaatcagggctgaaggaagccgggctgtggcccgtgctgccttcggacgccatggctgtggaacaatgcctgaaagcgctgtcatggtgccacgtggcaggcttccggcgtatcttgcccagatagagggggtttcctggcggtgaagcgcatttttccggtcaaaccggccttcgggagaaaaaaatcttgaaacggggatgcgtgtaacccactctttcaccgtcgtcaacttttccttaccgcttccatctctccatgaatgagtccgcaaaccccatcctcaaatatttttcggaattcaaaatcctgaaaaccgtatccaaggatttctggcttaccaacgtcgtccagttcttcgacggaatggcctatttttccatgattacggtattcgtcctctacctgacggactattgcagcttcaacgatgcggacgccgccctctgggtaggcctgtacacccttttcatctccgccttcgtcttcgcggtgggttccatctgcgacatcatcggcatacggcgcacttacctgatcggcttcatcatcctcattgccgggcgccttatcatgggcttcggtccggacctcagcccgaccgtggactccggaaggctggccgtcatggtgggcattctgattatgtccttcggcacggcgttcatgtcccccgtcatccagacttccatccggcgcttcaccccgctgaaagcgcgttccacgggcttcaatatctactacctgctgatgaacatttctgccgtcattgcgaacgtgttcctgattgaatttttccgcaagcacttcggcgccgtggacggcgggtactggatcatcaacttcggaacgctgatggtgctgctgggctgcatcaccacccgttttattaatgaagacaactacgcggaacccagcgaacgggaggcgaacatcaatgcccccctccgcagacctctccagctcttcatggaggtatggaaggaatccgccttccgcaaacttatcctcttcctggtgctgaccatgggcgtgcgcatcgttttcacgctgcaattcctggtgatgcccaaatactacgtgcggacgctatatgacgatttcgccataggctccatcaatgccgtcaacccggccatcatcgtctccggcctcatcctgctcattccggtgctgggccgcttctctaccgttggcctcatgattgcgggcatgtccatctccgctttctctctcgttttcatggccattcccattgaatggtactacctggtgcccggcatcgaaacgcgctcccaggcgtatctggtagccattgtggcgcagatcctggtattcgcattcggggaactgctcttctctccccgcttctccgaatatgtggcgcgggtagctccgaaagacaaagtggcttcctacatgtctctggcggcgcttcccatgttcatcgccaaacccatcaatggcatcatcggcggcctgctcgtcgcctacctctgctatgacggcatctgcgccaagatggataccgggcacatcggcttctgggactccccggaattcatgtggaccatttacctggccatggccgtaatcagccccatcgccattatcatgacccgcaggaccatcacctcggaccatcccgaggaagacgcggcatcgccacccatcagcgccattgaagcggaaacggatcccgccctgacggcggaagaacttacggaagccaactcctga

SEQ ID NO: 4 - DNA, 12540 bp, unidentified
  source 1..12540: mol_type = unassigned DNA
ccccgccattggctgcactgccgcagtcggctctgcactggtgtctgtatctgccggctgggtgtccggctgggtatccggagatgctgtgctgctctccggtacagtaccagtactgccgccggtagtgccggaagaagccggttctgtttccgcgggggtgttattggcagggtcataggagaacgtaccgcccacctgcaacgtgccgtaccacgttccgccgccggagatctgcacaccaccgtcctcggtcaccttgatgttctgtcccagtgtccagtcaccggtagtggtcagctgatcgccgcgtaccagccagccgtagagcacgctgccgctctggtcatacaccacgaaaacggcacactgctttgctgctttcagctgctccagagctgcctgtgtcacaacggtctgaccggtgcaggcaaactgatagggatcatccggcgtgccggtaccggctgccgcctgtgtcagagcgatcactgctgccagtgtatccttgggagaatccggtgtatccggcgtgtccggttcgtctggttcgtccggctcatcggggtaatccggatcgtccggcaccaccggtgcttcttctgatggacgcagctttttcagacgttccagctctttctgagcctgccgcacattttcctgtgccaccgccagtgccgtctgtttctgggcaacttccagccctactgctgtcatatcatagtccagcagcggtgtacccttggtcacatggtcgccctcttttaccagcacctttgcgatcatctggtcgtcggagggcgtgacattctgcacatcaccggaaaccacctgcccgtccatagagagatcatctccccaccagtactgggtcagatttgccactggcaacacatctacgcggttctttttcgtctgctgtgtccggtaaatcaccgtaccgccgacagtgccgccggcaacgactgccaggcaaaccgccactgcaacgatcttttttccttttgtcatgaagcatcgccctcctgttctgtccggcgttctccgaagccgccctgctccagcatgccgtcccgaatggtcacgatccgctgggcatgccgggcgatctccggttcatgggtaatcatgacaatcgtcacgccctcgctgtgcagctgggcaaacaattccatgacctgttcgccggaacgggtgtccagtgcaccggtcggctcatctgccagcagcagacggggctggctcaccattgcccgtgcaattgccacacgctgtttctgtccgccggaaagctgagtcggcttgaactgtatccgttcttccagccccacacgtgccagcatttcctttgcccgttccagccgttcctttttccgcacgccggcatacaacagcggcagtgccacgttttccagcacagactggcggggcagcaggttgaagttctggaacacgaagccgatcttctggttccgtatcgtggaaagctggttgtcgctgcactgtgccatgtcctgtccgtcgaagaaatagtccccgctggtctgcttgtccagcagcccgataatgttcatcagcgtggattttcccgaaccggacggtcccatgatcgccagatattccccttcttccacctgtagctgaatgtggtgcagaacggggacaggttcttttccctgcatataggatttacagatgtcccgcaaatcaagtaccatctgccgcaccgccttccgctgtatctgctccggcttcgtctgccggcatctcgtcaacaccgtcgccggcatcttctcctgctccggagatcacgctgtctgcggtgtcgccgtctgcaccgtcgcctgccatgccggcttcatcatctgctccgccgatcacgccttcgtccacagggtttccgttttcgtcgtaggaaatatcctcattgctgttgtcgtccacggtatcatctgtgccgtcatcttccggtgttgcttcgtcagggttggtcgtggttttcataccctcctgataggaatccgacgggaatgcgatcatatcgtcctccgacagaccgcttttgatctcgcagtcgcccatggtgtcgtctgtctgtcctacttctacttcccgcttttccagacggtctttcttatcggcagcccagacataggtcttgccgttttcatcagtctgtacgtagtcggaatacagccagatgccggttttttcaatgctttcatcggctccggtatctgccgaaaccagcaaatgctgccccagcatcagcccgtcactggaatccagcgtcacataaaaaggatacttggaagcggtggtcatctcatcgctgccgccgtagtacatgttgttgttctggctgttgtcggcttcggtagagatctccgaaatagtgcccgtccagctggaatcgtctacgcgggagtgcagcaccatggcttcatctttataaatcgactgtacattctgctcgctgatcgtgcacttcacacggaattctccgtcggacatgatcttcatcagcacatctgtgccgtccgactgaagctgttcggtcgttttcagagactgcaccgttccggcgatctccgcagtcactgtggcattgttaatggtattctgtaatttttccagttcgatcttcttggtcttgatgtcgtattccgacttggcaatatcggtttgcagggactggatctgcgtggtataagtcagcttatcgtctgcactggcacttttcttttccgtttccagctggctgatctgctgcttgttggactcgatctcattctgcatgcgttcgatctccacattgccctgctgcaattccagctgcatggattccacatcataggtgaacagcgggtcaccggcgttgacatggtcgccctcctgcacgacaatgctggaaactttcttggaggtgtccagcttgacttccttggtttcctgcggttctaccacgccggaaaactgcaagtcggaaatcgttgttgccgcagaattcacatcttttatcggcatcacgtatgccacaccgtccacatcactgcccctgctgtagtgccgccacaccagcacgccgctgacgcataccgccgcagctgtaacaccggcaactgtgccgattatgattttcttggattttcccatattccttcctcccagtccatgctccgcagcagtgcgttctgccggcggagttttttgaagcagtcctgcacaaatccagggcaataccgcacaaagagcgtctggcgactttgcatgccatctgcttgcagtgtttccctagatgctgatttcatctttttggcagctgtttcaactgttgtattcctcatgcaacggattgcctttagtataccacacctcttgacggttgtcaagaggtttttcaaaatttctgcggaagatttatttgggaaatttgtgcaaaggtgaaaggcgggagagggttgtgcggtgttctcttaaaacggagaaaaatcacctcacaaaattcgcatatcattatcgtgtcacgctctcctaaacagatgctctcacgccgaaatccgacaataccgttccccttccagcacctgctgcatgtacttttccggtgttgtcatgcagacagcactctgaaacgtaaaaggactgcagccggacaccagcactgcaccggtatcgtctttcttcaccggaaactgccggtttctgctgcacacgttccagtagaccaccgcaggcagctgataccctgccgcctgatatgcctgcttcatctgctggaatatcgtcacgccgttgccggactgctcgtcgaattccatgtccgagatcacatagatcactttcggcagttcctccggcggcacgtggtgctgaactgcactctgaagtatcagacgaaatactttttccagatcggtattgctgacttcattataggacatacagtgctccaccttttgaaaaatgtcctcccctttcagggcaatcaagcgggggttgtcggaaaaggtgatgaagtggttgtggaaatatccctcatttcgttcggcacagtaaatgcccagcgaaacggcaacatgaatcggcagcacatcgctgaaatagttccagtacatggaaccggaaccatctaccacggcaatggcattctgttccggcatataatccggcagggacttccatgtcacgtccagtatccgctgtttttgtgcaatgtcatcataaaacattgcgttttcctccaactcgatgcagtcccgaacgatctcataggggaaaagctgacctgctttcaacaatcccttttcctgctctgcccgttccagaaactcggagtaccgctgtccgtcatgcttgcagaatgctttctgatacttgtacaaggctctggagggcagtttggcatagtcaaaggtgtagtccttctggcaaagccgcttttccagcacgtccgcataggtgcgaagctgggagagcattttccggtaagccttttccgaaagatgcagccgcttacagagcagctttgcctgccggcacacgttctgattggaggtgtgcacagagggcagccacttcgccagcagagagatcggcttttcttccagcatgtcctgttggtcttgctgtagctgcttctggatcagctgtatcagttccggctcacagggcgtgttcagcaataccatacaatcgtcaaaccgcccgtactccggaatccactgcaaatttttccggacactttcgggatagatcgctgccgcatattgcagcagctgccggaacacgctccgttcacccaatccgccgcgggtatcccgcaggtaaaacaggatccgcatcgcgtataccggattctctgcatatgccgccaagaacatgtctttcaggcgttttgcagaagcttcccgcaacgcaccggctgtggaaaacaggttcagacacgcatcgccggtatcgtgatacgccagtgctccgttttcggtgtttgtccagttcagttcctctgataatgcattcagcatgaaaaacacgtcctttcttgttatgtactgtacgattgttgaaaaagccccacacgaaaccggtttcatggcttcgtatagggctgcctaaatgctccacgatgctgtttcgatggagaacccatctattcaattttaggcaataccgcacaaagagcgtctggcgactttgcacgccatctgcttgcaaatttcccgtcatatttcacaaaaatgctcgtgaatacatccagtattcactccgctttttgtttcatctgacgaaaaatttgacgacgcatctgtcgcacaatctttgtgcggtattgcctttaaaaaggaatcgcaaaaaaacgccatacggctgcatcataagaatgacgcaaaaacaaaaataaacaacattcataaaatattgctgtaagcatcgttctgagcgataatttaagctgcacacagtgcagcagtgtcggtatatttcttctgttttttctgagctttcagtttggttttctccagcaactgcatgccgtgttccgcttccagataccgcagcatcagaatgattcgctcctgaatcttctgccggtgcgtgtcccgactgttgcggaaaataacgtccagcggctttccgccggagaattcctgacagatcttcttggaataataccgtgtagaaaacaggtagaattcctctgcacctacaagcagataaaactgcattgtgccgcgttcttggttgcggcagatcaccttgcaattgctgttctttctcatgtaaaatcctcctttgaaaatgataatacacatggctgtgcctggcttacttctatcggaacgtcacccaatgccgaaacttgtccacgatgctgttttgacggagaacccatctatttaattgtaaagggaatcgcaaaaaaacgccttacggctgcatcataaaaatgacgcaaaaacaaaaataaacaacatttataaaatattgctgtaagcatcgttctgacaagggaaacacggcacaaaaccgtcaggcgggcttgatgcagcgttttccaaggtttccaacgggattttctcttgtgctgtgcacaatttcggcagcaggtacgcaagtctgacgaccgcaatgcatactatctgctgcatcaaatctttgggtgtttgaggcgtgatatgcaattgtcaagatgcaggaaggaataaaaaaaggaatatttatttaaaagcagacataacaaacccgtaattacactagggtttcatcacgtcattctacttttaaataaatattccttctctcgcattccttcctcgaatttgagattgtttttattatatcacatctcgaccgatttgtcaagccttttttcaaattttttggaaaaaaatcgaaatggctcaaattccggagaatccaagccattctgtttctcgattttgttttcgggtgtgttgacacgaagcctgacacgtgtcttttggggtgaccccctagaaattcgatccattccagccccagtgttctgtcatggcatagctgacatatacccgatcggtgggaattttcagcgtatccagcagaataccggtaatgtggctggtcagtgtttccagagcattggcggaagcgttcccgtacaggctgacttctgcaatcgctgccggttcatttgtaccgcggaaaaacagctggcggttgtcctcgacctccaccatcagccagtctgcgattttccccggaattgccgtgatcgcaagaccgagatgcttctgtatggtgtccgccgttgcagcgggcacggcacagttggttttcaacttgataaatggcatagcttttcctctcaatctctgcggaaaatatctctggtatagactttgttctccacatcgtccagacaggcatcataccggttggcaatgatcgcatctgccgccgccttgaatttttccagatcgttgaccacaacgctgccgaagaacgttgctccgtcctgcaatgtcggctcgtagataatgactgtagcaccctttgccttgacacgcttcatcacgccctgaatcgaggactgccggaaattgtcactgttggatttcatagtcagacggtacacgccaatggtaacctgcttttccgtgccggcattccagtcgttgttctggctgtaatcatagtaccctgccttttccagcacgcggtcagcaataaaatcttttcgtgtccggttggattctacgattgccgacatcatattctgcggcacatcggcatagttggcgagcagctgtttggtatccttgggcaggcagtagccgccgtagccgaagctggggttgttataatgcgttccgatccgcggatccaagcatacgccgtcaatgatctgctgcgtgtccagtcccttcagttccgcataggtgtccagttcgttgaaataggacacgcggagggcaagataagtgttggcgaacagcttgactgcttctgcttcggtgaatcccatgaacagggtgtcgatgttctccttgattgccccctgctgaagcagtccggcaaaggtgtgagccgcttctaccagtcttgcatcgtccatgtccgttcccacgatgattctggacggatagaggttgtcatacaacgccttggactcccgcagaaattccggactgaagatgatgttcttactgccggtcttttcccgaatgctcttggtataacctaccggaatggtagacttgatgaccataatggcattcggattatactgcatgacaagggcaacgaccgcttctacagcactggtgtcaaagaaatttttcttgctgtcatagttggtcggggcagcaatgaccacaaaatctgcatctcgatatgccgcttctgcgtccagcgttgccgtcagatccagttccttttctgcaaggtatttctcaatgtaatcgtcctgaatcggggactttttctggcggatcagttcgaccttttccggtatgatgtctaccgccgtaactttgttgtgctgggcaagcagtgtagcaatagataatcccacatagccggttcctgcaactgcgatattcatggatcagaatcctcctcatttctgtactgtgtcacctatatagtataccactatttttttacattttcaagaagtttcccgcattctcatgaaaattcgtttcaaaacgcccccagctgccgtctgatccacgccgtttccagcacatcgtagacatactgattgggagaaccggtttcaaaatacctttcggaattgccgcccagcatttccacagcaaaggctcccacggctctggaacgggattgtccgccgtagcagtgcaccagcagcgtttccacagaccgatgtgccagaacaaatgcaataatctgatctgccatttcatcggtaaacaaaactgccccgtccacctctcggataatgtcatcaaagtacagcgtcagaacacccttgcagaactggttctcgcaaaactgaaatccgaatccctgcgtgtgcgtatcctgaatcgaaatgactgcatacgtatcctttcgttccgccatatccgcctgtccgaaacagtagaaatgctgcataacatattcaaaggcatcatatacagactttaccagaacccgtttcatgctctgttcaggctttcaaacaccatggttgcctgaatgcggtcaccgcccagaaatcccttgcttccggaagaagaagtggtgatcgtgtgcagacggtatcccttggcagcctgtgcgttgatgaccttttccagttcagacagatttccggaaccggttccgatcagcttctccttcagaacgacctgcaaaacaacataatttggcacataaattctcctttacaaaaatatagatatattataacataaaactccgcatatgtcaatattattatttgcatttttccgaattttgtgctataatatacatatcaaatttattgcacaggaggaatttccaatgtgtaccgctgcaacttatcagacaaatgatttttattttggcagaacgctggactacgaaagttcctacggggaagaaatcgtcattgtgccgcggcagttccggctgtcatttctgcacatgggcgtatctgcacagcactacgccatgatcggcactgcacacgttgcccagggctacccgcttttttatgatgccgtcaacgaaaaggggctttgcatggctgggctgaactttgtgggcaacgcctgctacgcctcccgacctgcagatcattcggacaatgtggcacagtatgaattgatcccgtggattcttagccagtgctccagtactgccgaagccaaggaaaaagtggaaacgctttgcctgctgggcacgccgtttcacgaaaaaatgcctgcggcacagctgcactggctcatcgctgacaagcaccaagccattacagtagaagccactgccgcgggaattcaggtctatgacaatcccgccggtgtcctgaccaacaatccgccttttccggagcagatgttccgcctcaacgactttctgcacctctctcccaagcagccgcagaacaacttttcggacaagctgccgttgcagacgtacagcagaggcatgggagcactggggcttcccggtgacctctcctcccagtcccgctttgtacgagcagctttcgtgcgggcgaatgccgtttccggcagttctgaagcggaaagcgtcagccagtttttccacattctcggagccgttgaccagccacgcggctgctgcgaagtgaaagacggacagtacgagatcaccatttacacttcctgctgcaatgccgacaagggcatctactactataccacctatgaaaatcaccagatctccgcagtctgcatgcatcgggaaaatctggacagcgaccagttatgccgctatcccatgcagaccggagaacagatctgttaccaaaactgaaaggacaacatcgatgtcaaatgtaaccaaacgtgctctggaacaatccctgaaaaatctgctgctgaaaaaaccgctgacaaaaatcactatcggcgatattaccgaggactgcggcatcaaccgcatgaccttttactaccatttcaaggacatctacgaccttgtggaatgggcttgtctggaagatgccagacgggctctggacgaaaaaaagacctatgacacgtggcagcagggacttttgcaaatcttcgaagcagtacaggaaaacaagccgtttatcctgaacgtctaccgctgtgtgcatcgggaacaggtggagaaatacctacagccgctggtagaccaactgctgctggacgttatcgacgaggaagccgcaggcatgactttgcgggacgaggacaagcagtttatcgccaaggtctacgcctatattttcattggcgtgatgctggactggatcaagaacgatatgcgggaaaatccgcaggagatcgtcagccggctgggaaagctgctgcaaggctccgtcaccgcagccatttcgcggttccggttataaaggaaacactgattttatcattttcgcatttttgatagaattttttacacttttcggctctgtgatgaattttttatcacggagccttttttgctgattgtgaattcctgaaaatcgggtataatagaattataccaatggcaataccacaaaaaattatttttataactatttttattttataaggaggcattgttatgtattattccgcaggaacttatgaagcattcgcacatccagaaaagccgaaaaatgtggacaaaaaatccgcgtatatcatcggcaccggtcttgccggtcttaccgcagcattctatctggtacgggacggacagatgaagggagaacatatccacctgttcgaaaaactggagcttgccggcggtagctgcgacggacgcaaggacatcaccaagggctttttcatgcgtggcggacgggaaatggacaaccactttgaagtcatgtgggatacattccgcgatgtcccctctctcgaaacgccggacgtttccgtgctggacgagtactactggctcaataagcacgaccccaactattccctctgccgtgcttccgttgaccgcggcaaagatgctcacaccgacaagaaattcgctctggacaaggcatcggctctggcactttccaagctgttcctgacaccggaaaaagatctggaggacaagaagatctcagatgttctgccggacacattctgggacaccaacttctggctgtactggcagaccatgttcgcctttcagcgttggtccagtgcgttggagatgaagcggtatctgtgccgctatgtgcaccacattgacgggctgccggatttcagtgcactgcggttcaccaaatacaaccagtatgagagcatgatcctgccgctggtgaaatatctggaagcccatggcgtacagatcgaatatggcatggacgtgaagaacgtcatcattgaaaccgtaggcagcaaaaaggttgccaagcagatcgtataccggaaagacggcaaagaacagaccattgacctgatcgaagacgatctggtattcatcaccaacggctgctgcacagacacctcctgctacggcgaccagacccacgcaccggatctgtcccacctgaaaaacggctgcggagaatcgtgggatctgtggaaagcgattgcggctcaagcagttcacggcgaattcggcaatccggaagtcttttgcagcgacattgatgcgacaaactggatgagtgccaccgttgccaccgcagatgaggagatcattcaacatattatcaacgtttgcaaacgggatccccgtgccggcaaagtcaccaccggcggtatcgtcaccgtaaaggacagcaccgacaactggtacctctcgtggacgatcaaccggcagccccagttccactcgcaggacaaaaacatggtgctgatatggctgtattccctgaacaccaataaagagggaaactatgtcaaaaaggcaatgcgggactgcaccggcgaagaagtttgtcaggaatggctgtatcatatcggcataccggaagaaaaaattgcatcgctggcgaaaaacgcctgcaacaccacgacctgtttcatgccgtatatcaacgcctttttccagccccgcaaggaaatcgaccgtccgcgtgtggttccggagggagccgtcaacttcgcctttatcgggcagtttgcagaaacacctcgtgacaccattttcaccacggaatattccatgcgtaccggtatggaatctgtctacaccctgctggacattgaccgcggtgtgccggaagtctggggcagcaagtacgacgtgcgggaactgctgcgtgcctgctattatgccattgacaaaaagccactcaccgacgaagaactttcctttgtggaaaagaagctgctcaagatcgttctgaaaaaagtcaagggcacggatattgaaatcctgctgaagaacagcggactgatcgaataa

SEQ ID NO: 5 - DNA, 13686 bp, unidentified
  source 1..13686: mol_type = unassigned DNA
ctattcgtttccacaaacttcattaagataatcattccatttctcttttataaggttaggcttgaatctctttaaaacacctcttgctttatttccaatgctatctgctactagtggattttgaaatagataaatcaatttttccgctaacattgaagcatcacctctattcacgataaacccgtttactccattttctataagaaatcttgcacctccaggactcgtatcagttgttattactggaagacctattgacatagcttctaaaagagcattagaaatgccttcaaaatccgatgacatcacgaaacattttgaagtagctatatattgagccggattattaactttccctttaaactcgaccttatcagaaatgcctaaattcttggtcaaacgcatcatttctgataaatcttcaccatcaccataaaggcataatttaacattatctatagttttgcaaaaaaatgagaatgctatcaacagtacatctattctcttttgttgcacatgtatcctcccaacataagaaatctcatctttcctttgagaaaaaggcaaaatcgtttgaatccccgtaacaaatatcggatttggaatgacagatgttttctttttaatgatattcttaaagaacgattgggcttgaggtagttgaaagacagcaccatcagcccatctataaaaaaattgagctattttagcattcagtggcaacttagcataaggatcactcctttcacaaacaactaccggcacatgagtttggatagcagcaaatatactatacaatcctgcatcatataagaaagcaacaattacatcaggatggatttcttttatcttcttccgtaaatcaaatataattttccatcgttcggctttctcccttattacttcgctccattcaacgttctcagaaaatgtatattctgtatttgaataatagaaagtatgcagaaatatacgattctcgttatattcagataaactatttaccgtccaattaaacatttttgagtacccatcataagtgactctttgcccgacaaacaaaatccttttattcataattatcgcttataaaatctaataatctatgcacatattttacattattaaaatgcttttggaatatggcatgacctttttggcctatttcagtagcatgagatttattttgcataattttatcaaacaaaaaagctaattcatttacatccaattcgtttataataaaagcagagtttgtatcaaaataataaggaacttctccaacacgatttgttattatgggtcttccagttgaggtatattctgctattttctgactaaatcgtgctatgtcttgtagattggaagcatctaaaggaatcaataaagctaatgattcagaatacaacttcaataaatcactataaggcaacccttgtttgatagaaaccttttctcccaatccgtttatttctatctgttcttggattttttgtatatcgttttgatttccagaaagaaccaacaccaaatttgcattcccttttttagaataaatatcatacgcatctagaataaaatcaataatgcgtttatatgcagcacttccgcaatatgtgaactgttcccgaattatgtctactacagaattttcatttgtagcagacaagactggagtcatcaacataggtttcttgtatttttcacatctatttttcaaaaaatgagaaataggcaaaatgaaatcacaaaaatatccgaaataacgatcgaatgcctttgtgctatataaagtatacttagatggattttgtaatgttgtatatcgtaattcatgatacaggactccaattttatatcccaatattttcatccaaatacattctattatgtaaataataaaatgattggaagtcagaatggtatatttatattctttcctaaggcgaaataataatattaaaatctttacaagattgtacagcctacccaaaagacctttttgaggatatatgccatataatatccccgcatttttaccatgaatctctttttcaatcttattatagccccacataggattaatgatatacaccttccgaccaaagtgcagcaaaccttgtgataagatttctactttggtgtttcctgcagaatattcaaatggataatcttgtgtggagtctaggaaaatatagttagctctcactttattttgtcttttaaataataatagatgttgcagataagataatataatcgaatcttagcgtacaaaaaacagtcatatttattaattctcatattaagaccatttattttttccaataatcctaaccgcttaatttcgttatggtaatgtgaaacaactttcaatagaatacggagattaacttccaaatagtctcgcttaaaatctaaattttggcttaagacgtattctaacaatcctatgtaaaatactacatatccatacaaaaaacgagcattagtggagttttttaaattggtaagtcgatcgtcagctttatcatcacaatatatcgtatgaacctctggcaatacagagactattatacttttctgaattaagtatctaaataccaagtcaacatcctcataactccacatggattcattatatccattaacattcaaaagaggttccttggtaaacatccaagcctgtgtacctacaaaagcaccatcttgatgcagcaagaaactatgcaaacaagatttctccaatatcggagaaggcacaacatctatattccttcttttgtaatgaagtcccgcaacacacaaatcactacccttgtctatcattataccaatctgactctcaatcctatgtggaagcatgatatcatccgaatcaaaaaagcaaatatacgaacccttactatgctttaaaccatagtttcttgccgaagaaggccctttattactttggcataagtatacaattctgtcatcgttgtaatcacgaattaaagcttccaatagtgcggaaacatttttagaagaaccatcatttacaatgatgatttctaaatttctataagtttgacctacaatactgtctatagtaggtttaatattagccctgttataaactggaattatcactgatactaatggcactctcatttttcaaatatttaacaccttatacggaacgttgtgtatcaagcttgcgcgttttgcaaatccggaattatacataatgcttgttttgactaaatatattttcttagccttagccagcataaataagtcaagaaaggattttatataaggtaaatcttgtgatactgtatggtagtccatgtgatatacccttccttctatgatagaaacgtaatcaatatcctttacatactccaaaaaggtaatgctatctgatgttatgagaattttttcatcaggattctctttatgcaacatgttgattgcatttttgcactgttccatcaagttttgccgcttctcttgttttaatactgggtaattaccttctttaaaatcccccaataattgttggaatctataaaccattgcaatatactctcctcctattttctcataattttcactcaataaattcgagagtttgtctgttggtttgaaaagttcatgaaacaaccgggaaaagcatttgtctcccaaatctatattggtataaatatggttctgtgcatctcgtacaacacgctttataagatacctttcttgaaaagcatgttcaaatggtaaatctctattatatatatatattacatttgtattctgagaaaagtccattttagaatcatcaatcaaccaatcatatttattgggcatcaggtaatcttctattctaaatggagacacaaaataaatcttaaaagaaactttcattttctttgctatataatacaatgacacacaacctcttaacctgtcagaaagaccaccatgaagcatagagccgtcagctatatacactatgccttggaattgcttagaacaagttggagcttgatatctatgccgaagtacagcctcaacagcagtgttcattattttaccaacgtataaaaaatattttagccctcgcagataatctatcatacttacttactgatttatagtcttataaaaataatttttaatttcttgatcagacattttataaaggtctgtattatatgttaaaccaagaaccatcggaaatacaaaatagcttggtgtgaatgcgaatgaatattctatccataacatcaaccacataaatggtactaccaatcccactatcttacagaatttattattagatacaactatacaatttatactcatcttatacaacattaacatgtaaaagataagcccaaaagttccaaaccaagtaaaaatggactctatatgcacctcgctaattctctccatcgaggttccttttaaaaaaaatccgagtgacgacatgcggtctatttgaaataaagactcatgtccataatagggagtgcgcccccaaataacatatccattattaaaggcagactctatggcctctaaataaataaaagttctactatcctctaaggcatttgctgttctatcattagtttcgtcataatattcaaatccttctcccatataagatttcatatcaaatacgttaaaatcataacgtaaagccaaaattaaagctaacaatggtatacaaaagacaaacgtgtgagttatcgcaaataatctccttgaaagaaacgggacataaaacatcatcaatagcataatacagaagaaatatctcatatagtatatgcgctgttctgttgttaaaatcgataaaataaacactaaaatcactatgaacttacgtttcgtattcaggtagggatataataaaaagaaaaataaattcattcctagtatatctgcataattaagatataatgcaaatggaagtaacaacacaaagaacggtataatatacttaaaatatagacttgaaacccctctcaagaagttttgccttccataaaatattatgcccaataatagagacaaggaaaacagagcatctgcctgatttatcggaaacaaagaagaaggatgaatgcaaagtttggcaaagcctactactaaataggcaatgatataatataaaaagtaattggtaaattggttctgtttaatatgcagattcttttttattaagaaaacaatagacattataattgtcatagtccaagatgcaaagatctgcaatctttgaggatatttgaagctttccacaattcttgtaacatacaataaaaaaaacactgcaacgataaccgtaaaatattttattatataattcgttaccaataatagaaaggtgtttttattaataagtttcataagttatctatttttttaataaatctggcaggtacacctccccaaatctcgtatgggggaatatctttggttacgagagaacctgccccaataatagaattattaaatattcttaccccccccattattatagaattcatgcctatccatacattatcatctattattataggacgcgtaactttagcatatctgtcttcatggtcatttctgtcacctatgataacatttgccccacaaaggacattgttgccgattaacacactcttgtcgcaaacaatactaacagacgagaatccacaatcatttcctatttgtattatagccccagacttccctgtttgaatgatgcaaggattacgcagccctctaaaattgaataaggaggacgaattaaatctacaacgtttaccaattgttatattactattgcgcgttttataaaaaataattcgacctcggaagctacatcctttatcaagatagataccccaaacaaatgcttttacttttgctattacagtataatgtttttttataaatttatttcgataccaatacagtttttcaatgattgagctcataatatattttttttgagattgttttatataaatgattcgtctggttaatcaagtgattgatgaaaatgaatctgagaagcctatcaacacatatcagtccaataaatgctacgaatgaaaaaaagaccatcagtataatgaacatatatcctggataatgagtagcagaaaacaacgcgtaaatttgctcaacaaggtctaccaaagcctttcttgcatatacatcctcatcatgcatgagatatacggcgaatgttgatgccgatatattatttaggaaactgctttttatatttattcctttgaaaaacaggaaaaccaaaaccgattgtaatacgaccaaaggattgatatatcctcgaaagctccccaaataatgtctttctaaaaagattagaatagaaacaatcaagatactgtaaatacactttttcctatttacattaaaatcaaaatatctaatacttccacctatgaaatacatatagacaaagtggttgtaattaaatccattcaaattataatcactatgtaagattcctccacatactatattcaaaaaagttaatagacataaaaatagaatcacattctttctatttgcagagaaagccatgtttaatataggagcggtaacgaacaaatagaaatatatttcaacaaaccaccacggactatttctataaaagaaatggaagcgctttaaaaatgccataaaagacagtgaagtctcagagaataaggaaaaaacaatccatattgcaacagaataaaatgcacaagtaataaaaaatcggaaaaaactgtttgcttttaatttgattccaaaatatccagatatgagaagaaaggcattaacgtgaaatcctaagaaactctgtatacccattgaaaagttattggcacaattatcaagcaaaagtcgatcgcatccgtgatacaaaatgtggctacataggattgaaaatatgcagataatcctcagtaattcaaaatttgaaagccggttatttcccgatatagacatattacttatgtttaattatagatttatatagataatctctttctgatttagttaaccctagaaatagaatgacgtttgttaatattacgaatgaaataaccgcacatacgaaatcataggttattgtttgatttatatgtgttaaactgagatgatacagggttatcataaaaatggaactaaccaaaaccgtagttgaaggtctaattacagtacataaatattcacgaaaaggcattttaatcttaggtaaaatgatgtacagcctgcctatttgagttaaaatggcaaatacaatcattgaaatgtatacggagggcggagacatgccggtagaaagcgatatataggcacttggtaaagtcaacaacatgatcgccccctccactatttgaaatctttttatattaccagttgcgtgaattcctattataataggattagcaaacgagtttacaagtaaataagccattgtaagcttgaaaaagacagatgtatattcaggtacatcaatcagccacattttcaaaatgtaatcaatgacaaaatatagaggaacagctatcaagattaatatataaaagaaacttatcgagcttagggcgattaatttgtgcataaaagcaagattgttctctgcgtatgattttgttatctgaggattgatagccattcttgcattgttggcaaaagcagcaacgtaatttgacagtgaagtagagagccctctagcagcatttatagctggaccgcaaaagatatttaggagaacgctcattccttgttcaatagtcattacagaaagatttcctaataaattccatccagcaaaagagaacatcttacgaaaaacaggtctgtcaaatcttagtttacacttagcctcttcaaaattccgtctgcaatacaccaagtaaaaaatcctatcaaccacctgtatcattgttaccagaatagcgtagaaaatcaatttatctccgctaaagaaaaccagtactatcgtagcgagcaacttcattgttgaatcaaaaattgagatataagcaaatgatttcatcctttcatatgctattataagagccatgtctggtgtagacatgatattcaggatggtgacaacagaaactgaatgaagtactaaaattgaggctgtaactcggtcataaggtaagtttaacttgttgtaaaccatccattgcccaaatgactcaattaaaaccaatactaaaagaccaataccataatgtattattctcgcttgattatatattgtgcaaagcttttttttattattttcacctatcgcaaaggctatgaatcgtgatgttgcaacgctcatggttgtatttaaaaacacaaacatagaagtaaccccgcccacaacattatatattccataatcaataacaccaagtgcgtccaatacaagtctactggttataagccccattaacattgtaatgaacatccttacgtataacaatagactattttgagcaatacgttttttatttgtttctagagttcccattatagatgtagtttctgtctaaacaatctcaagattttattagaaacgtgatgaagacctattaaatatttaccaacttgagggtaggtatagcaaatacaagcttctgcccataattcatgaatatctccccctaatatatacttgaaagttttagccaatgagatcttcacagacagcccagaggttgtaccctcttcctcactaaaatatttcaagaaggatagtgcactgaacttaaaataataaggtttatgaatcaatgcgtataataatgtttcttccatttctgccaaaacatcagaagcctcattcctcagtcctaattcactaaggcacataataattctattggaaacggttttattagtttctgcaatctcttcattgtctattctactatcaacagcaaataaagggactgtttgtccgttatgcgttttatatccaatagttgacaattgtggatttgctgacaaataatcttcaacaaaagaaataaaatatttaggtaattctacattaggattatgagtataaaagtttaccggaaagtaattacgacatcgtttaaatgtgtgccaatagaaacaaggtgcaggacgaataccgaatttctgttgcaataaattcaatgcgttcaatccacttcctttccaaccgacatccacaaaagcatataaaatatcatcaaacaagccctcttgataaaaatagtcctttatgttctgctgctcattttttatgtgttgctccaatttcctatagccatgcttattgttaattaatgcaaacaactcatctagtttggaagatgcgctattccttatttcgctttcgttatacaaagaataatctacgtattcatttagcttgaaatattcaacaaccttgttaatacttaaattcttgctctctaatccaaaacatcgttcaatatttcttctatttattttatctatagttggaagatacaatgatttccgggaaacatataaatatttcaattttacatctgattcctgactatttagcatttgagccatataatacaaaatccaactatctctcgccaagaagtatagtctttttatcccttctctttttgatacacttaagacatcaagtacgaatgcaagacaaataggcacggctacatctgctgaaaattcaatgatgtcaacatttctattacccattaatgaaatcctcgcaaatcttaaaacgccaataaaactgccatataaataggccatccttttcgccttatacttgtttagtatatattgctctattggtgtatatccggtattctcaattaaataagcatcaattcccttcttttttgcatttatatagtcacttcttttattatcaccataatggcaccaataatcaggcatcaaatcttttcgaaccagctcgaataacataccgtccgatttggatacaccatactcagaagatatatagattctatcatagggctctgaaaccccttctttttcgagaacgcctctaataaaataagaatctaaatacatgtcagatataaaagcaatcacaaaacctttagatcgtttttctttaattgtcgatactatgagttcattcctatacagattctgtctttcaatctttaactcgcattttcttacgtattgactgttgtattctgaaaaacgttctgttggataacagcaataaatatcctctatggttggatgtgatttattcatttccaacctcaccatcttttctgcttcaagtctccagtttaaaaaactttcttgcttcaccacagactcgggataaagtctccttgacaacaaaaagaaaatattgtttggatatccacattttcttattaaacaagtatcaaatatatcgaatgacgctaatttcatctttcagcaattgttatatattgcgttaatgcctaaaatctacatttaaccataatcggcttagtgtattttgcaatcttcgagtatatacccattttggcatacttacgaatattttctctttttattttttgcataccactctgcaaacattctcagccctacccttaatggggtagagggcttgaagttgaaatcacgctctaaaggagtgatgtcagcgtatgttacggatacatcaccaggctgcatagatacaagctctttgtgcgcctcgaaatcatagtcggacggaagtactccggcacgtaccagttcttcctgtaatatggtgacaaagtccaatagattttctggacgattgttaccgatattgtacacacaatagggcgggatgggcagaccatcctctccattactgcattcgggagcatgctgcatcacgcgtatcactccctccactatatcatcaatataggtgaaatcacgcttgcagttgccgtaattgaatatctttatgttctctcctttcactagcttgtccgtgaatccgaagtatgccatatctggacgtccagccggaccatatactgtaaagaagcgcaatcctgtagatgggatgttgtatagtttgctgtatgcgtgcgccatcagttcgttgcccttcttggtggcagcatagaggctgactggattgtccactttgtcgtctgtcgaatagggaaccttctcattgcttccgtacacactactggaacttgcatacaccagatgctctacacctttgttcccgtcatcatacgagtgacggcaaacttccaatatgttgtaaaatcctaatatattgctcttgatatacgaatcaggattagttatgctatatctcacacctgcctgagctgcaaggttcaccaccacttccggttgataatcactaaacagagtttcaacttcttccttgtctgctatatcgactctcataaaaatgaagttatcatattcggaaagtgaatgaagccgttcttctttcagcgacacatcataatagtccgtcatcgagtcaatgcctaccacttttacatcttccacatcctgcaaaagtctcttcgcaagatttgcgcctataaatcctgccacaccggttatcagcacggttttgccgtgcaaagatacgtttttattaaatgccatcttatctatggttgtataatccatacagcgtatatactatttatcaagcaattacgccatatttttatttaaaataaaattcagtttatattttgataagcactcaatttagggcatactcctttaataaggcatttttcattgctctaaaccaagttaagtttttaacattggcttgtgaccaaggctatccgctcaggagccatgttcacgttatggtaagttacggacatctgaagctcccacgccactgccaaaatgcagcgagttgtttcgcttcgattatacattacagcttaatcatatccaaacctttggtaaatactcaattaaaaattagcctgcctcatctattttgtctttgacgtactttctcccctattgagaagttcaattcctctgtcaagttcctcctttctataaaaagcacttaaataatatttcttgtcgtcacccttcctgtctgtcaaaaagaactcaaattcacctgtagaaaatttgtttttcggtaagtctgctttgtctatgcctaattccaataagcaatgcttataatcaaaacttatggagagaagattatggtataggttgttcggcatacaataacgctccatcagactcttcattttgggatgatggaatccattgtaatacaaataacaagctcatatcaagactctttaaattttataaatgttaaattttgtattattcttcctcactaagccaatggttatgctcaataaacttcagaatagtataaagatgcctgaaataatgttcgaatgcccctgaagtataataatcatccaacgcatccacgctttttgccccaagaactccggacggtccatttacagattcactatgaccagtgctatcgtgaacaatatgttcgcaaacttggaaaacataataaaacatgttacgcccattatattcaatggagagtactacctctttgttttgcccgtcagggccgttgggattgtcttctttgacacttattttatttgtttcctttgcatacaaatcattaactatgtactgctgcaactacatcatattaaaaaacttattttcaaaatgttacaaccgtaaagtttcgctctgcaaagcccccttcgcgttggacttcctattctttgcgctacatactctcaattcatagcgttgctaatcgaacgtcacaatcatgcaggcaaaagcaagggcagaaacaagggtattgacagtgccaaaactgtctccgaacaagtccggagcacagttgcaaccatccacggagaacagacatagctgacttaacatccatttggtcagaaagaagccgtttatgcaaatgaaaagacatgctaatattgccatgttgccatggatcaccatttcgttgcattgggttctttctcatctgcgcgtattttttatatcaaaatattatcttaacaatgaacatgcgtttattatctagttttgccaatatttcgccaccaataatgccacgtttacatgttggctaaatggaaagtaaggctgtaaccctcagtccctcctaaaaatatccctcgtataaaccttttcctccacatcatccagacaagcgtcataacggttggcaatgatggcatggctctggcctttgaaggcatccaaatcattcaccactttactaccgaagaacgtgctaccatcttcgagtgtcggttcatagatgacgatctccgcacccttggctttgatgcgcttcattacgccttggatgctcgactggcggaagttgtccgagtttgatttcatcgtcaggcggtacacgccgatgacacacttccgctcctcggaaggattgaagtctccacggttgtagtagtcgtagtaaccggccgtgtgcagtacgcggtcggcaatgaaatccttgcgcgtgcggttgctttccacgatggcctcgataaggttttcaggaacgtcttgatagttggccaacagttgcttggtgtctttgggcaggcaatagccgccgtaaccgaacgaagggttgttgtaatggcttcc

SEQ ID NO: 6 - DNA, 30148 bp, unidentified
  source 1..30148: mol_type = unassigned DNA
tcagttaaaaagtccgctcatactgtcaagctgaacctgagtgttggcactcattacaccgttcataaaaagcacctcgtcaattccgttggttttgcagtaatcaacaagattctgtttgaaatatctgaaatcgataacatgaacttcttcgtagttattggtgagatacggaacaaaagcgttgccgtagctttcctttacaacggcaatcttcttgcctgccgccgcattttccgaagctgatttcagaaccgtgagggcattatcacccataataaacacaccgtaggtgtttgaaccgccctctgcggcttcatagtagggactgtcatagcttgcgtaagaaccgtctgcctgtgtgatatccattgttacattataagggaacttccaataacttaccgtatcgctgtcaagaccgtctgccgagttggtaaacgagcctgtaaagccgtcaattttctgttcctcgcaatcatcaagcgaaagaacgggcaaatcgtttgtatcggcaaatgctgtgtaagcatagtaagcgccgaggcctgtccaatggtggtcgctcttaaagtagatgtaatctgtattatgttccgcaagacggttgtagcagttaatcggagttaccttatcggaaagagccgcataagctgccttgatgttgtcagcctgtgaggttgacggagcgtcactgtctttgagtctttgcggaagtcccatttcggtatggttaggaacaatcatatcataaacctttacggaactgccgaacttgtctgcaaagccgttgattgtctgagcatagttctgcgctcttgcatcatcactgctgaacaattcgtagcctattttgttccacacataaatgccgtacgaaagagttccgtttgtattgtcgtcctttatgctcggtgtcataaagtatgtaggagaaagctcgtctgctttgttagctgtcgaagattttgcggtttcgtcgggagatgccgttgtacccactgttcccgtgggaacgcttgcaagggcatcttcctttgaacagcccttaaaaattgaagttataataaaaataataacaaacagaattatcaatgcgctcgcaacgataataattctgtttctggttcttcttttgtttcttctttttacaggtcttctgacgggacgctgtgatgacggtcttgcggcatagcttgcaggacggcgctgttgctgtctgcgacgatattcacgggaatcaatgctgtcatcgaaattatcaagatcaaaataatcgtaatcgttccttctgctcatagtgttactctcccaaactgaagatttttaaattcaatttgaattcaatgaattatataagtgtattaattactcgcagtgtactcctgtttgaatcaaagcaagccttgctctgaccgtaaggacattatcacttagattatacaacagaaactcatcaaaaacaatacaaaaagcacaaaaaatacaatttccgtgaattaacatttacaaatgcaaaataataaattacacattttttgaataaaatcgcagtaaaaacagtcaaatttcttgaacatatatgcaattcgtgatagaattacagggtatggaattttaaaaaatccttatcatcttaaaaggagatatttttatggaatacaggttttccgacagggtttcaagcctgaagccgagtgctatcagagaaattttcaaatatgccgccgatccgagcgttgtatcgctttcggcaggaaacccgtcgcccgatgcatttccctcaaaggagattgcggaaatctcggcaaaggtttttgcagaagatccgatttcggttttacagtacagcgtttcggagggttacactccgctgagaaagcaccttacggaatatatgaaaaaggagcataacacaggctgtgacaatgacgacattctcatcacaacaggcgcacagcagattatggatttatgctcaaaggctcttgtaaacgagggcgatgttgtaatctgcgaggcaccgtcattcatcggctcgctcaacacattcagaagctacaacgcaaagctcgtgggcgttccggttgagcctgacggtatgagcacagaaaaacttgaagaggctttaaaagccaatccgaacgcaaagctcatttacacaattccgaattttcaaaatccttcgggtgttacaatgagccttgaaaagcgtaagaaagtttatgagcttgccaaaaaatacggtgttctcatcattgaggacaacccgtacggcgacctgcgttacagcggtgaatatgttccgaacataaaaagctttgatacggacggaattgtaatctatgccggttcattctcaaaggtaatttcaccgggtatgcgtgttgcttacacaattgcaccaaagccgatttttcaaaagcttgttgtgtgcaagcagggcaacgatgtacatacaaacatctgggcacaatatgtatgcgatgagttcatcacaaagtatgacttcaacgctcaccttgcaaagcttcgtgaaatctacacaaagaaagcgaacttctgcatggagcttcttgacaaatactgcgcaccgaaaatcacatatcataaaattgacggcggtcttttcatttggtgtgacttgcccgaggatattgatatgccgaatttctgcaaagaactcgttctcaaaaaggtttgcgtagttccgggcaacgcatttttaactaacgaaaacgaaacctgtcacagtttcagaataaacttttcaacaccgactgacgaacagcttgaaagaggaatcaaaatcctcggcgagtatgcaaacagtctttaatcacggaggggaataatggaaaatcagacaaaaaaagaggttgtattcagcgcaatacagcccagcggaacaattacactcggaaactatctcggtgcggttcgcaactgggttacaatgcagaacgaatacaactgcatttacgctcttgcagatttgcacacaatcacggtaagacagactcctgccgttatgcgtaagaatataattgatgcttatgcttcaattatggcttgcggtattgatgttgaaaaaagccttttcttcattcagagtcatgttcacactcacgcagagcttgcatgggcgctcagctgttacacacagttcggcgagctttcaagaatgacgcagttcaaggacaaatctgcaaagcacgccgacaacatcaacgcaggtcttttcacatatcccgtactcatggctgccgacattctactctatcaggctgacaaagtgcctgtcggtgcagaccagaaacagcacattgaaattacaagaaacattgcagagcgttttaacggtatttacggcaatgtgttcaagattccggacggtttcattccaaagaacggtgcaagagttatgagtcttcaggacccgacaagaaagatgagcaagtccgatgaaaatgtcaacggctgtgtacatcttcttgatgcccccgaggttataatgaagaagttcaagagagccgttacggacagcgaggcaaaggttcgctatgcggagggcaaagacggtgtaaataaccttatggcaatttacagcgcagttacaggtctttcatatgagcagattgaaaaggattttgacggcaagggctacggcgacttcaagacagctgtaggcgaggcagttgttgaagaacttcgtccgattcgtgaacgctacgaaaagcttgtggcagacaaggcatatcttgaaagctgttacagaaaagcagatgaaattgcccttaaaatcagcagccgcacaatgggcaaggttatgaagaaaatcggttttatttaaacccgaacaggaattttctctatgacaaaagcagaaagcaaagtcattgactttataaaaaaacacattcttttatttttactcgttgcggtaacgattattgcaattttcctcagagtctgcggaatggattttcaaagcgatgatttcaacagctttttaaattcgtggtggagtataatcaagctaaatgattttacggggcttgcaactcaggtgggtaactacaacattccgtatcaagtcataatctaccttatgactcttttgccgctaaacgctctgtatgcgtacaaaatcgtatcaataatattcgattttgtacttgcaatttcaaccgcaatgcttgtttactcgtttgcaaagaataaccgacggctcaaagcgatactcacctactcagccgtacttctttcggcaacggtgatttttaactcatcgttttgggcgcagtgcgattcaatttacacctcgtttataatccttgcaatcctgtttttgcacaaagacaagccgattgcatcgtttgtgttcatcggcattgcgtttgcattcaagctgcaaaccgtattcatcattcctgttctgctttattactggatttcgacaaagaaaatttcgattctgcatttctttataatccctgcggttgatgtgataatgtgcctgcctgcaattattatgggtagaccgtttatcgatatcatcacaatctacgctgaacagaccgactacggaaagcttattcagatgaactgtccgaacttttacgcactcatatgtgacggaaacgatataacatattattatctgttcaagcagttttcggtctttctgacaattgccgtactcggaattatgatgtgcattatcatctataaaaaggttgatttgaagaaccttgaaacttttcttctgacaacagcgtggactgtgttcacctgtatcatgttcctttcgtcaatgcacgaacgctacggttatctgcttgacattattttaattgtctgtgcggcagtaagtgcaaagcatttgtggattccgattgcgtcaatgcttataagcctgagaggctattgctactatctgttctcctacgagcttataaaccttaaattaacggcaatcatctacaccgcactttatgtttatataacattcctgctcgtaaaaacaattttcagagcaaaatcatctgataatgtttttgcaaaaacaatttaaaattaaacatattttaaataacaaacaaccgccaaaatccattatatcgggttttggcggttgttatttttatttattcaatgatttttaatttttgcaaatacaacagcaacaagaaatgtgacaaattctgtaattgggaacgcaagccatatgcctgtcatttgaacagcgctgtttaaaagccaaattacggggactaacagcacgccctgtcgcaacagttgaactacaacgccgggcataatactgtctgttgcctgttcataggttgcaatcattgcagaaaagccgctgaacacaaatccgagtgacataattctcattgccggcactccaaaagcacacatttcttccgatgccgaaaacaaaaacaatatctctttcgggaaaatcagcaccaagagcataccgacaatcatcataacagtcgcgataattgttccgctcttatttgcttgtttaaggcgaccgtactcttttgctctgtaattaaaccgcattataggcaaacagccttgaatcagtccgttcaccgtcataaaaatcaactgctgaaccttgaaatatgctccgaaaaatgcaaccgccgtgtccgaatatcgcaccaaaaacatatttgcaaaattcacggtgaatgctcccaacgcattcataacaaacgagggcaatccgtaggaaaatatcagctttatcatctgcggttcaaggcagtttttaaacaccggcttaaccttttgttttgtaagaaacagctgtatcaacgcaatgattgttgaaacaacatagcctaaaaccgtggcaactgcagctccgaccacacccattttcggaaacggacctatgccgaaaatgagcaaagggtcaaacacaaaattgaatacaacacctgcaatttgaaaccacatcggagcaatcatattgcctgttgcctgaagtattttttgaattacaatatgcaccatatttggtatctgcataaaaacgcagacgctcatatacgcaattccgtattcaaaaatctctttgttttgcgtaaaagccgaataatagggatttattatgaaaagcgaaaggaaatttatcagcactccgacaactaccgaaattaccactccgagagccgctgcagaatttgccttttgctgatttttctgtcccaaataacctgcaatcaaaacattaacacccacacctatccacacggacaacgcattcataagcgttgtaatcgggaatgcaagcgatactgccgcaagtgcctgttcatttatccccgcaacaaacatactgtcaacaaggttgtatgaatactgaaaaaacattgaaatcagcggcggtgccgacatttgaattataagtttgttgacaggttcataagccattttgttttccgttttaacgcccatattaacaccccttgcgtaaaataaaaatcgccatacacccataatgagtgtatggcgaaaataagaatcacatcttagaaaaatccataccaatttatatttatcatatcagtaagctaattatatcatacctgtaaaaaatattcaagattatcaccaaaaatttactttttgctttcaagccacatatcaagggctttttcatagacatcaatgcttgtgattccgagattcataatgaatgtgtgatattcctttgcgtcaaagcttgagccaagctcgctttcggctgtttcacgcatatcaatcatcttgaggtagcctacggtataggggagaaaataacccggatttgaacgggcaaggtcatacgcctcttttgttgcggctgtaacgctctcgctgtcagccgaaccgagtgccgttgacatatactctttgactttttcataatcccagccgttgtagttcacaccgacatcgaccatggaatagagaatatagccgagaatatcatttgcgtagataagcttcttaatgccctcgcttgtatcaaggtaatcaagcgtacattttgaagcatactgcgcccagccctcggtagcgccgataaagcttaaaatcttgcggacattcgggatatccttgtttgcatttgatgcggtaaactgataaagatgaccaggatagccttcatgggcaagagttgtgtacatctgagtcatacccttatttgcaaagtcggggttgattttgatgatattaacgcttgtatcgtcaattcgtccctgaacatagtacgctcccacattgtcgctctttgcggaatcgctcatataatctgccgtgtaagaggttgtaacgggagtcggaaagtcctcctcgatattctcaatcaaaaattcaagcacctcatcggcgtccttaaagtcgggtttgtagtcctgaaatttgctcaagtcatcctgcgaaacattgctcatgctcattccaacctttgtaaagctgtttgtaaggtatgacttaagctcctcgggagtcatactgctgcttgttttgtctttgacaattgccgaataatactttttgccgattttgccgtaaccgcaaagaccttcttcgtttttgcctgattttttgagactttcaagtgctgaatttgctgatttcaaagcaggaatgtagtattcttcaaaatactttttgttggtttcgacaacagtctttttctcggaatcgctaagaccgagtgactttattctcgactcaaactcgtcaacaagcacggacttgtcattcttaatatgcttttcgcactcgtcaattgactgctgtgcgatatcttcagccataaagtaaccgtcctcagcctgtttccttgtgaactcaatgcactcatccatatagcgttttgtgtccttcaaaacagcaaggtaaaggtcggtatcatccttttcatagaaagtaaactcggacagggtggtaaagagatttgcaacaattcccgactgcggtgcaaatatactctgcaattctgttgtaccctcatatgaaagctgaatttcaaagtagctttcaagggtgtcatatgtctgcttttgagaagaagtaagtcccgaacggtcaaactcctccaaatccgtttttgcctctttcagttcatcaaaggattcttttgtatcttcatcggacacatgaccgagggtatagtcctcctcgtcatatttcagaccgtagtccgacggatttgaaatgtcaaaatgtgcggtaagagcgtcatcctcaagttcttccgaaaacaaatcgtcacaatatttatcgaactgaatttgtgcatccgttttggttggttctgtgtcagaatcaaagtcacaggcacagacagaaaacgccataacggcacataacataacagcaagcgcacccttgagtgactttttatttataattttcttcattttgtcctccgtaaagattgttgtttaccaaagtataacatattatcgtgctgttattcaatgattatttttaatttttcccttttccgcagtaaccgtagcaacgctcaacaggcattgccgttcttttttaacaattgttgaaaactatgtggaaaatgtgtataataatcagccctgctcaattgtatttttgtaaattgtaaccatttgtaattatttgtaattttctctgtaggggcgttcattggacgcccgccttgatgaaatattatgtccatacacatatgttttgatataacataaattgtgtattcaaatttgcacgaattgggaacggcggctcaccgtaattttcaatttataaatgctttatcgcttcgcttaaatccgtacacaaaaaatctatcatcggtttaatttcgtctgtcggctctgacaaatcgggaaccataaccgtggtcatacctgcggcatgtgcagattttatgccgttaatgctgtcctcaaacgcaacgcagtccaccggctcaagcccgagcttctttgcggcaatcaaaaaaacctcgggatcgggcttgccgtttttaacatcatcaccgcacacgaatgcgtcaaatttatcatagagattgattttcttcataatcttcaaagccgtttgtgacgaggttgaagttgcaagcgaaattttacaaccgactgattttaaataatcaaaaatttcgtacaagcctttttttacaggcacaccgttcttttcgatacgcttaaaatagcggattctcgactccgccttgtaagcaggatagtcaaaatcatcgccgtaaaccgacttgtaatattcgtaggaatcctcactgcgaagtccgattgtctttttgaaaatgtcgagattaaactctttgccgtcctcatcaagcatttcctgccagattgaataaacaagcctttcgctgtcaatcataagcccgtccatatcaaaaactgcgcccttaaacataaaaccgccccttttttcgcttttaagtctgtatataatagcatattttacaaaaaaagacaaatcagttgtaattgcgacaaagttatgatacaatcatttgaatggtctgtgaaaaatataaatttgagggtaaggaagttttatggcaacatcaatttatgcaaaacctattaaggcaaaaacgattctgaagttcactctgccaaccgttcttatgatggtttttatgtcactttacacggttgttgacggaatcgttgttgcgaactgtgtcggaagtgacgcattgtctgcaatcaatattgtatatccgttcacgctcgtatttatggctgtgggcttaatgttttcaacaggctcaaatgctataatcgcaaagaaaatgggagaaggcaaacaggaggaagcaaaccgacttatgtccggtgttgcaatcacggcaacggtcatttctgttatcattgctgtgctgttcacaatttttgccgaacctatgtacatgatgttcggctcaaacgaaaaaattctcccctactgcattgactacggcagcgttatgattccgtacggctttgtaatgtgctggcaaatgctcaaccaatcgtaccttgtaacagcagacaagccacatatcatgcttgttttctcgatactgtcgggttgcacaaacattgtgcttgacattctttttatggcagtgtgggattttggaataatcggcgcaggactcggcaccattataggaatggctgtgggtgcaattccgcttttgctctttttcaacaagaagcaaactctgcactttggtaagcctgaattcaaggtcagtgaaatcctctttgcaatggcaaacggctcgtcagaggctgtgacaaatctttcaacagccgtgacaacagcgctgttcaacattcagatgatgcactttgcaggcgcaaaaggcgttgcggctataagtgctattttgtacattcactttattttcactgcggtttcgtttggattcacttcgggagtttcacccgtcatcagctttaactacggcgcacaaaaccacgaaaaactgcaaaagctgttcaaattatgcataaaaatcacgctgataatttcggttgcaatgattacggcatctgaattttttgcagaaccgcttgtcggaattttctcggcaggcaacgaaaaaattcagcagattgcactcagcggattcagaatttttgcaataaattatctgttgtgcggaatgaatattttcgcatcgggacttttcaccgcactcaacaacggcaagatttcagccgtaatttcagttgcaagaacgcttgttttcgagtgtgccgcaatgctgattttgccgatgtttataggcataaacggtgtatggtcggcattgcccgttgcagaattgtgtgccgttgcaatttccgtaacatttataattgccaatgcaaaaaaataccatctggtcggtgtaccaccgcaccccgttcgtgcagacagtttgtgatatcaaaagcatatcatgcccgagtgtagcattgtaaccatttgtacaaataaacgcaaaaaatccgagcatcaaaacaatgctcggataattttttacaacattaaagctcaattaaaatcgaaatcagattgcacgaactctgattacgccgtcaactgctgcgatttttgcaaggtcatctgcaccggcgcctgcaacatcaataattgtgtaagcatagtcgccacggctctttgaaagcatattttcaacattgccgctgatctgtgtgagaaccttcttgagaagctcgggaacattcttgtgagcaacgcagaaacgggtatcgtcagcatttgttcttgcaagtgaaattgcaggatagtttacggagttgatgatgttaccgttctcgaggtactccttaacctgatcacaagccataacagcacaattttcttcactttcgggagttgatgcaccgaggtgtgggaggcagataatattctcttcaccgaggatatcgtctgttccgaagtctgtaacatacttagcaaccttgccgctcttaacagcctcaagaactgctgttgaattaacaagaccgtcacggctgaagttgagaatacgaacaccgtctttcatcttggcaatcatatcggcatcaaccatatctcttgtgtcgtcagtaagcggaacatggattgtgaggtagtcgcaatttaccataacatcttctgcgctcttcatgagcttaactgtaggagcaagcttgagagcgttgccaacagacataaatgggtcaaagccgattacattcataccgagagcaacagcggcatttgcaacaagaataccgattgctccaagaccgataacaccgagagtcttacccttgatttcgggaccgacaaactgactcttgcccttttcaaccatcttaccgacagctgcaccgttgcccttgagagtcttcgcccattcataaccctcaataaccttacggtttgaaataagaagtcctgcgataacaagctccttaacagcgtttgcgttagcacccggtgtattgaaaacaacaataccctgctcgctgcacttatccttcggaatgttgtttgtgcctgcgcctgctcttgcaattgcaagaaggttatcggcaaattccatatcgtgcattgcggcacttcttacaagaactgcgtcagggttctgaacatcgtcaccgtatttatagttatcaccgagacggcttgtgccgatagcggcgattttgtttaatgtaagaatgttatacatcaaaatcaatcctttttaattttttattttaagaatttacaataacaggcgaacagcgttcgcccgttatatcataatattcaataattacttgttttcagcctcgaacttcttcataaactcaacgagtttttcaacgccctcataaggcatagcgttgtaaattgaagctctcataccgccgactgtgcgatgacccttgatattaacaagaccgttttcagtagcctctttaacgaatttagcgtcaaggtcagcgtcacctgtaacgaacggaacattcataagcgaacgatcctcgggaacaacagtacccttgaaaagctctgaagaatcgaggaaaccgtagagaaggtcagccttcttcttgttgatttcatacatcttatcaagaccgccaacctcgttcttaatccattcaagaacaagctttgcaatgtagattgtgtagcaaggcggtgtgttgaacattgaaccgttgtcagcgtgagttttccagttaagcattgtaggagtgatatccatagcgttgccgataagatcctcacgaacgataacaaccgtaagacctgccggagccatgttcttctgcgcgcctgcatagagaacgccgaactttgaaacatcaatcggtcttgaaagaatacaggaagaaatatctgcaacgagcggaacatcacctgtgtcgggaagctcgtgataaacagtaccgtaaattgtgttgttcatgcaaatgtagaaatagtcagcgtcttttgtgaatgttgaaggatcaagctttggaatgtatgtgaaggtcttgtcagccgatgaagcaacaacattagcctgaccgtaacgggcagcctctgcatgagcctttttagcccactgacctgtgataacataatcagccttaccgctctttgtcataaggttcatagggatagccgcaaactgtgttgacgcaccgccctgaaggaaaagaaccttgtagttgtcaggaatgttcataacctctctcaaaagagcctcggcaccctcgatgattgtaccgtaaatttttgagcggtgtgacatttccataacgctctgaccactgccttcgtagtcaagcatttctgccgctgcttttttaagcacagactcaggcagcattgaaggacctgccgaaaaattatatactcttgccatttctgatatctccctttttaaagaaaatttaaaaatatagttgtaaaaataaatacacctaaattatacgcttttagcacgctaaagtcaacaaattcatagcactaaagcataaaaatcgaaaaatttcgggattctgttgtgcaaatgaatcagtcaagcttaattttgccgatacagccaacgatttcatccctcatacgctcagcctctttacgagcggcaacggcaaaatcatcttctgtaagcccctgctttttccatgcgcacataatgccacggcttgagttgatgattgcaccaagaccgttttcgtcaaatgcgtttttaacatcatcggcaccgccgccctgagcaccgtaaccgggaacaaggaagaatgtgtgcggaagttttgctctcatttcaccgagctgttcgggatatgttgcacccacaactgcacctactgccgaatagccgtgcttacccataaggtcttcgccccagccttcgcacatcttgcccatatgctcataaacgctctcatttgtttcaagcttcatatcctgaagttcgcccgagcttgggtttgaagtttttacaagaacaaaaatgcccttgtcatccgaatcgcaaatttttgcaagcggcttgataccgtctgttccgaggtaaccgtttaccgtgagtgcgtctgcaccgaatgcgtcaatgctttcgcctgcaacatctgtatgaccgaggtgtgccgtagcatatgcctccatagttgtgccgatatcgttacgcttgccgtctgtgataacgaacataccctttaactttgcataagcgattgtgtcacaaagagccttaacgccctgccagccgtacatttcataatatgcagcctgtggctttacggcaggaacaatatcataaagcgcgtcaataagcgccttgttgaattcaaaaagtgcagcagccgcaccctcaagcgtcttgccatacttttcaaagcattttgttttgattgattcgggaacatagtcaagcttaggatcaagacctgcaaccgtaggattctgcatttttacaatattttcgataagtctgtcaaatgccatagtgattctcctcattttttgttattctttctatgatcgggcaaacaattcatatcccgacagcaatatcttttttacaatgctgttgttcgcccctacgaattattattttttagctgttgataatatcataaagttcatttgagaacttgtaataatcctgtctgtcctcttttacaaactgaattgcaggacggggatgtgtgttgtactgacctgtgagaaggtacggaatatcgtaaccccacttaacgccctcagccttaaacttgtgggtgtactcctcaatgattttgagaataggagcaacctgatacttcgggttcttgaggaaaccgagaagaagttcaagcgcacagttgcctgcgcctctgcccatgccgtcaacggttgcgtcaaggtagctgacaccctgagtcatagcctcaattgtgttggcaaaagcaagctgctggttgttgtgagcgtgaataccgaccgacttgccgtacttgtcggcaattgagcagtaaaggtctgcaagtcgtcttgactcctcgggatagagtgcgccgtagctgtcaacaatgtagaaagcgtttacgggagttttgccgagagtttcaagagccgctgtaatatcctcggttcttgcctttgaaacagccataatattgattgttgtttcgtagcccttctttgcagcgtcctcaatcatttcaacagccgcaggaattgcgttgatgtatgttgcaactctgatgaggtcaatcgggctgtccttctttgcgataatatccttcttaaaatctgttctgccgacatcagccataacagcgattttaagaggagtcttgttgtcgcctacaatttttctgatatctgcatcgttacagaatttccacttaccgaaatcttcttcgttaaagatttcctttgatgccttgtagccgaattccatataatcaacaccggctttaacatttgcattgtaaagatccttgataaatttgtcgtcaaatctgaaatcgttacaaagaccaccgtcacggattgttgcgtctactactctgatgtcctgtcttaccgacaggaggtcacctttctgtgccataattttactcctttatgttaaagtttatattaaatttattttgtaggggcggatatcatccgcccgcttgatgtgaatttatgtttgtgaaaaactatttgatatcgtcaatgttgttttaaaatcatatcccgttgaaataaaacatttgtatttttaaaacaaaacaacatattttaatgagcaaacaaatagcaattattcgttttggttttacaaccaaaacgattggcgaacacggttcgccgctacagtatatcattatctttgtttcatttatataatttgttttaacaacaatttcgcactattacttgcgggcggataatatccgcccctacgggttttatttgctcaatcttcaaaaactaccttaccgccgaggattgtctttttgaccttacctgtgagggttctgcctttaaacggggtgtttttgcttttgccgtgaagtttaccggcatcaactgtccattcttcatcgggatctataagaacaacatcggcatttgcaccgactgaaagagtgcctgcgttgattttcaaaatccttgcaggattaacgctcatcttctcaacaagctgtgaaagcgtcattttgcctgtcttaaccaggtatgtgttgcagaccgcaaacgaggtttccatgccgattgaaccgttgggggcttttacaaaatcagccttttcctcgggtgtgtgcggtgcgtggtcggttgctatgacatcaagtgtgccgtcacaaagcccgttgataatctcgtcaacatcagcctgagctctgagaggcggattcattctgtaatcagcgtcacctcttaaaagctccctgtccgtgagcgaaacataatgcggagcggtttcggcggtcaccttaacacctctccttttggcatcacggataagtgcaacgcttgttttggtgctgacatggcagatatgaataggctcgttaagagcggcggcaagtgcaatttctcttgcagttccgcagtcctcggcaccggcagggattcccttgacaccgagcttttcagaaacctcgccctcgttaattttaccgccgtcggcaagaaacaagtcctcgcaatgtgcgacaattgtcatgccgagctttggagcttttttcattgcgtcactcaaatactttgtgttttcaacaggtctgccgtcatcggtaagtgctattgcacctgcacttttcacagcgtcaatgtctgtgggttcttcgcttttaagccccttggtaacgcttgccgcaacataaacacggctgtcggcgtctttagctttgtcaagaatatactttacaatttcggggctgtcggttgtcgggttggtgttcggcattgcaagcaggcttgtaacaccgcctgcggcagccgccttgcatcccgtgataatatcctctttgtgagtctgaccgggatcacgaagatgcacatgcatatcaacaaatcccggaacggcacaaagaccgtctgcatcaataatctctccgtctgatgtaatgccgctgccgatttcggcaatcacaccgtcctttatgagaatatctgttttttcgttaagcttgtcggcaggggaaacaaccactgcgtttttaattagcatttccatgtttttcctccgttaagaaaagaaattatcttctcttgtttctgtttgcagggcggtgattctgctgtgggcggcggtcggttctgctgtgaacctgaacaagtccgtcgctttctcctctttcggcacgcattcttgcacgctctgccttttgtctttctctctctcttctctcttcctctgcctttttgcgtttggcaattgcacgcttacgctttatcattattgaaacattcttgcagaaatatccgcagtgaatgccaaaattcttcactccgcctgcaaagcccctgagagcgttaccgatgtttttgcctacattggcaagaacctcttccgttgaccgtttatcggtcggttcaccctcggtttctttattattctctttttcaagagcgttctgctttacggtttctgcttttctttcaacctcgccgataacatcaaagtcctcggcatctctgaggtctgagcttttgataacccccattgactttttgggagcttcgtcaaaaaagtcataaccgctgtcaaacttgtttttcttagcctttgcccttacaagctcctcatcatcaacctcttccccggttttctcctcgggatcgtcactgccgaaaatgatgtttgcgtacttgtcaacctttttttcaagcggatgcttttgttcggaaacctcctcggtttcttcaacatcggcatcgtcctcacggtcgatatcgtcaggctcgcttgtttcaaaaagatcgtgttcgggttcggggataacgagtgtaggacctgacgaagagcttatgtcctcgtgtttttcaggtgtttctgcgttatctttttcgttttcgtcaattttttcgggttcagtctctgaggtatctgctgcggtaggctccttttttttttcgtcctccgtgctgttttcctcgtaaccgtagttgtttttatatgcctcacgctcaagctcactcttgtaagcctttgcggagttgattatctcgtcaatttctttttccttggcatcatccgtgtcataaccaaagtttgaatactcacttgtaatttcttccggttcttccatattttcgattatcggctcgggagcatatcttctgcccggcaaagccggttcttcttcaacctcttccgcatatttctgctttttctttgagcgtttatcgggcttttcgggagaatcgtcaaaattgtcaatgtcgtagtccgtacccttttcaccgagtttatacttgactgcaagctcctcaagaatagcgttattcttcttagcctttttatgctttctgattctcacggcaaaaattatgatgagaacaatcaagataaggataacaacaccgccgccgatgattatgtacggaataaatccctttgaaaacggcaggtcgctgaattttaccgaagatacaattttggaaaaagtatcgtagtcaacggttgtaacatcaccctctgttctctgcattgtgatattaatgttcataccgtcataaaccgtgttggcaacaaaggttttcacatcgcccttactgctctgagcagttgcgtcaaacacaagccacacagctttttctttttggtcgggagtacagctccgatactcgtcggaattaagaaaattgttgcgtatatttgaaagctcgcttgaagaaagctgagcatagttgccgacattctcgctgctctcattttttgtcattgtcacggtcagaataaccgatgacatgttatccataccctgaagatagatatttccgttctgaaaggttttcattgttgtgtcatagtcaagaccgaaaacggaaaaatatttatctgtgcttttactgtcccttgtaacagcgctcataccgtcaggcattgaaagcgtcatatcgtcaatctgcggaatctcgtaatcttttgttgcgcccgaacaggcaaaaataccgcaaaataccgttacggcacaaattgcaagcgttacagctcttttaaaaacagttttcatcatgtccgtatattcccccgaaactaaattagattcatcaatactgctttttagaatgtatatctaattaattatacataatctgtcaaaaaaatacaaggtttttaccgtttaaatttgaaaacaagagtaccctattcgtgaatgcagtatgatattaaagaacatattacgcctgagcgtgcataaaattgaaaattgaaaatggaaaattatggtcgagaagacaattagcaagaatacaaaacattgtcgcccgactgtttttgtatatttttggtatatacggaagttgttgcaaaactgtatgtacggatattatccgcctgcagataaccacgcaaagatttgtacaaattaaaattatataaataaacattcactttcatataaaacaaaaattgcatcaatgccgtatcgggcatcaatgcaatttctttatctgactatcttctcgaattgactgcggtggcacaccgccaaccgaaattttacattttcaattttcaattttcaattaaatacaagaccgccgtttattctacagtaaccgacttagcaaggttctttggcttatcgggatcaatacctctgttgattgatgtgtaataagcaagaatctggagcggaactactgctgtaatcggcataagaagctcgtctgtatgcggaatttcgataacataatccgcaacaccgtccttgagttctcttacacaggcgtctgtacaaacaagaataacctttgcacctcttgacttaacctcaacaacattgctgattgttttggggataatacctgtctgagttgcaacggcgataaccggaacatcctcgtcaataagcgaaattgtgccatgctttaactcgcctgcggcatagctttctgagtgaatgtacgaaacctctttgagcttgagcgaaccctccattgaaagggcatagtcaagacctctgcctatgtaaagcaagctgtcggttgcaacaagctttgtggcaacgaacttgcaggtatcctcgcagttgtcgattacatactgaactgcctcgggcatttttgtaagagccgaaacaagtcgcttgcactcggctgtgctgattgtttcctttgcaagagcaagctcaaaggcaaagagatacataacggaaagctgtgtgatgtatgcctttgttgacggaacggaaatttcgggacctgcgagtgtgtagatgagcatatccgcctcacgggcaattgaactgccctttgcgtttacgattgcaagagtttttgcacccttctgctttgcaagacgcattgcggcaagactgtcggctgtttcgcccgactgtgaaatgatgattacaaggtcgccctcgcctacaatcggatttctgtaacggaactcggacgcaatgtcaacatttacgggaactcttgcgagatcctcaataacatacttgccgaccatacctgcgtgcatggcagtaccgcaggcaacgattgtgatatttttgaaattcttgattgtttccgttgtgatgccgcactcctcaagaaacggaagtccctctttgattctcggcataatcgttgttctgatagcctcgggctgttcgttgatttccttaatcataaagtgcggataaccgctcttttcggcagcctccatatcccagtcggctgtctgaagttccttttcaatcggatcaaggtgttcgtcaacgaacgaaacaccgtcaggtgaaagtgttacgatttcatcatggtcaagaagataataatcccttgtgtactgaagaattgcaggaacatcggacgcaataaagcactcgccttctgcaacgcctacgataagaggactttcacggcgaaccgcaaaaactctgtcggggaaatccttgaacataattccgagtgcaaacgaacccttaagctcagccattacactgtcaattgtttcaagaggatttccgttgtatttatagtcgaggagctgagcaacaacctctgtatctgtgtcgcttaaaaaagttcttccctttgagatgaggaagtctttaagctccatatagttttcaataataccgttgtgaacgattgtaacccttgtaccgctgtgtggatgtgagtttacatccgaaggctcgccgtgggttgcccaacgggtgtgacctatgccgacatgacctttcggagtgccgacctctgcaagcttatcctttaagtcctgaagcttgcccttggtctttacggtcttgatttctccgttatcaaaaaccgcaatacctgccgagtcatagcctctgtattcaagctttgtgagagcattaacaagcacctcactgcaatccttaggtcctacataacctacaataccgcacataaaatttctccttttcggttaatcattgaccttgtggcaaaaagtaggtacaagttctgccaaaagttcaactgtcttttcactgtcattgttttctgcggtctttttgagaacctcaagctttgacagcatatctgtttcgtctattttaatttgatttcctatgaaaattttcttgttctgtgttgacttaagaccttcttcgtccataagaagctcctcaaaaagcttttcacccggacgaagtcccgtgaaaataatcggaacatctttgtacggaaccttaccgtacattctgataaggttctcggcaagggttgtaatcttgacgggagcacccatatcaagaacaaaaatctcaccgccctttgccattgcacctgcctcaagaacaagcgaaacagcctcgggaatagtcataaaatatctgataatatctggatgtgttacggtgacgggcgcaccgttttcaatctgacggcgaaacagcggaataaccgagccgtttgagccgagaacattaccgaatcttgttgttacaaattcggtatcggtgctgtgctgcgccttgtactgaataatcatctcacacgcacgctttgttgcgcccataacatttgtcggattaacagccttgtcggttgaaatcataacaaacttctttgccttgtacttttctgcaagggttgcaacattgaatgtgccgaagatgttgttctttacagcctcctcgggaacggtttccataagcggaacatgcttgtgagcggcagcgtggaatacgagttcggggcgatatgtcttgaagataagctccattttgtcgtaatcacgaaccgatgaaataagcgttacaaggttaagctttgtgccgtattcaagcacaagctcctgctgaatgtcatatgcgttgttttcgtagatatcaacaatgatgatttgttttggatcattctttgcaatctgtcttacaagctcactgccgattgaaccgccgccgcctgtaacaagacaaacctttccgttgataaggtcatgaatctcctttcggtcaaactcaatgggttttctgccgagaagatcctcaatcttgatttcctttgcctgtgaaataagctgtgtatgcccgtcatcaaacaaaagctcgccgagataagggataatcttgattttgcactctgttgcggaacagtagtcaagaatcttccttttctcatcttcctcacatgacggaactgcaacaataatattgtctatgcggtattcatcacatattttaacaatttcgggacaggttccgacaacggggattccttcgattttctgattcagctttttcaaatcatcatcgacaaagcataccggaatgatgctttttgaaggattattaacatcattctgctctttcgcattgtgaatttcacgaacaatcattctgccggcattgcctgcgcccacaataagggtgcgctctccgccctctgcccttcctgcctcggtaaggtcaagaaaagcccttctgaaaacaaaacggaatgcaagaattccgacaagggctattgcgaaatgtactacacaaaaaatctttctctgcggaatctgcaaaaacaacgagattacaaagccgagcgtaaaccccgaaaagacggcagttccgcacacaatatagtcctttgcgttaaagtatcgccacaattttgaatatgttccgcttatataaagcgtaaacagacacatgacaagatcaataacaatatagctcaacaagcctttgcttgaagcagtacctatgtagccgacaagcaagagaatataatttgcaagaataccgctgacaacgataataaacacatctgcgagagccagaaacatcttacgcaaattaatcttcttcataacccatacctcttctgtttaactttgtgtaaatttcccgagtaacatataaatacaattatgatttattatacaacagtgcaaaaggaatgtcaaacaaagcaattcctaaatcaacttaaaatccgacaatcaaagcacaaggagcagtaataatcagacttgttcgacacacatttgttgacaaccgcacaaaacgagcctaaaataataccatacttaatatgggcggtaaattgaatgaaaaatttttcgataatcctcggagcaataatacttgtgctgtttgtgactctcgtaatatggggcgtttactgtgacaacacaattgcaatcacaaattactgtgtaaacaatactaagaacgacgcaaagctgaaatttgttgtcatcacggatctgcacaacaaggaatacggagaaaagaacgcagaccttgcagagcttgtaaaagaacaaaatcccgattttattgcagtttgcggagatatggtcaaccgtggcgatcccgacacaacaaagatgaaagatgtgcttgaaaagctttcaaaaattgcacccacatactgctgtctcggcaaccatgagcgtgacaatgctgccgaattcggaacggattttaaaagcgaaacaaattcaacaggcgctgtattgctcgataatgaatacataaaattcaccaaaaacggcaagagtgtgcttatcggcggaatgagcgactacccttattacgagttctacactcccgatgacgatgttccgtcaagaacgctgtgggaagaatttgccgaaaaagcaaagaacaatttcacaattcttctgcaccaccagcccgaatacattgccgaggatgcaaagaaaaccgacatagacttaatcgtctgcggtcacacccacggaggacagattcaattgccgttcatcggcggagtaatcgctccgaatcagggactttttccgaaatatgacaaaggcgaatttgaccttgacggcacaaaaatgattgtctgcgcaggtctgagcaacaccgtattcatccccagaatcaataatcaagttgaaataggtgttgtgacggttgtataacatcggttctcccctattactttcatataaagcaaaaattgcatcaatgccgtattcgggcatctgatgcaattcttttatcagagtatcttctcgaatagattgcggtggctcgccgtcagttcttctcgctgtaattcctaagttccgcaggagttctgccgtattcggacttgcagaacaggataaacgaatttacatttggaaaaccgttttcaatcgtcgcctgtctgacggtgatttttttgtttctcaaatcatcaatagcgtgttcaagacgaacacggcgaagatactttgaaaatgtttcctctgttttatccttaaaatattttgaaaaatgagcaggcgtcatgcctacataattggcgatttcattgagcgtgatttcgtgtttgtaattatcgtgcatatatctgatagcacttttggcgcagtcaaaatcatcagcctgagaaccgtgaacatattgtatatcgttgtcaatgcaatcacggatgagatagtacgcaacgctgtacatcaccgctcttaccttcatgctgataagcttgctctcgtactcttcatatccgtggaatatgtccattgcttttctgataaactcaagagcttcgccctcgggttgtttgaaactcggcacaatatgcggatcgtcaacatacggtgcaattgcctttggaatgatattgagcataacagcctgagtatcctcaccgatgtcctcataggaatgaacctcctgactgttaagaacatagacatcgcccgcattgagaataatttcacaatcaagcttgttaagccttaccttacctttttttatataggaaatttcatatgaaccatgccacctgagtcccgattcaaaggcaacttttctgtccggatatcttgtaaccctgccgctgtaatacggctcgggcggtaacaacaccttcttgtacttcatggtttcacccttaactcaattaaaatcaatcaattgttaataacatagtcagcgcaaaaataaatatatttaagatccgcaattaccgcagaatggtctgtttttactacaactgttctgcgttcttttttgctgatttcctcaacacagcgtgcaacattgcactttgaaggctcgtagccgtacttttcaaaaaattcttccgcagtcataacaagcgagccgtagccctcaaacatatgcaaaagagaatagtcaatcagcttgtattcatcttcaataaggctgattccgatatcgcagtttgtgactgaaccgatgtaatacggtgcgtcattgaggaacaagcctgtcttgaacgaaccgattgaaacggtaagatccgagtttaccgccgtactgcacacacccgtgtcaccgttgattccgctgttgatgtctgcacttataacataggcatttgtcatattaatctgctcaaccgcttcaagcatttcaccctttaattcacctgaaaagcctgttccgagcagacagtcaactacaatgtcaaatcccgtgaaagccgccgcctgtgacatcggcatctcctcggcaccgagcgacattgcggttttataatagtaaaggccgtcctttgaaaagccgtcgcttgctctgaaaattgtcggtgtaaagccgtttttgcataaaatacaggcgagcgcataaccgtcgccgccgttgttgcccttaccgcaaactatggcaaccctgcccacaaactttgccgaattaaaaatcccctgtgcggctctgtacataagctccgccgaaggagtatgctccgcaatcgtccttgcgtcgctttttctcatattttcaaccgaaacgacctgaacaaattccatcttatattcctccgctttctgaaatttccatagccttatccgccgtttgcggcattgtaagccgtcataacagcactttcatccatattacaaccgagcaaaaacaacggtgtttccttaaagaactcatcaagcaattcaagcagcttttccattctgctccgctcaacatcaataaccgttgcctcaagcaactgtttcataacctgtgacggcaacaccctgactgccgtgttctcttctgctctctgaagaatatacacagccttaacgggtgcttttgtatttgttcctatgtcagctttccccatccacggagttccgtaagcataaaattttccgtcacattttcgtataaccggcttgtcatcgttaatcatcgtcaccctgttgccaaaatgccttcgccacagagccgtgtgggtagacttgcccgttccgctgactgccgaaaaaacatagccctcgccgtcaagctcaagacaggacgaatgaaaaaagaatccgtcaaatccgtcaagcacggcgttgcagaattttgagagtatcagaacatcctccgcaccttgttcgctgaggttgtcggaaagcccgagacgctcacggatttcgtcatccgaaaccgatatcgcaatgtcggtctttcccgattcattcgacttaacggcatagctttcaagccgtttcctgcatattttaaattttggattaacttcaacattcaaatcagctattctgtatatcggcatatctgctccgctaaatactataatgaaatattgtaacacaaattaatgttttttgctacggcgaaatgaataaatattattttaccttttagtgcaagttgttcagtcgcacagctttaaaggcaaatattgcacaatacaagccgtgttattttgtaacaatgcacatacagcttattttttattcattttaaagcctgtaaaaaaagcattattttacgactttttcaattttgtttactttacctgtccgactgcttttttgcatactcttcaaggtatgctctttcataaattcaaatatcctgtgcgtaaccgttcctataagaatcggaatgaatattcctgcggcaaggtagattatgcagtaaaaatttaagccgttcggacgataaatgtaccagattgttgacttgagttttaaaatatcgaaatctttgaacagcggtgtaattacgctcaatccccagaacgcccattttacaatcataaaggcaaaaatgtggtgaatcattatgctgtaggtattgtcagaaatcattctgacaagctttttgttcttgataatcggagtaatcagctttgcaaccctcagccagaacgcaatacccgtgattgcggttacataaggaatgacgcagccgttgtcaaacttcacgcactttgacggagtgtattcaagattttcacagaatgtgaggagaagaagctgaactccgagaacgattgcaaaatatgcaacgctgttgagattatcgtgtttttcaagcttttcgtgataaaatctgccaaactcaaaacacggcagaaaaaatattgacctgaacaataacagcaacgcaccctttggggcaggattccaaatgcagtattgcacaccgaaaattccgattgcaagatacacggcaagaatgacatactcgttgcccctgtgaacctttttgagcagtttgcggaacagtatgttaaaaacataaacacagaacagcggatatacaaaccacgaaccgaggttgtaggcaaaactttcgccgtcaataaacggcataacaaaaaggttgtacagatcaaatttgccctgagcaatcgtatagccgacctgagtaagtgcgaatgcaattattccgtaaacaatgttccatagatacgcaggaatcaacaagcgttttgtccgtccccatatatatttgaaaatatgttcctcgtgcttttccttgtaaaaatatcccgaaatgaaaacgaacaaggcgagattgtacgaatacttcggaaaccaatcgtacatcagcgacacaccgccgttgtagcaatgccccgaaactatgataataatgcctattgccgacaaaattttaaaagtaaaattaatgtttccgtcatcgccgagccttttgttttcagctgtgacactgttttgtttaagtgcagatttactgcgtgtttcgttctttcccataattccctctcatctgtatttgtcgcaatttaaaaattccgcaaattaacacggtaattgtaccacaaaagcaatctgcaatcaatatatcaaattcaccgtgcaaaacacatataaatcattattttgcacaatctcacttttgttttaacaggcatttttagcaggcatctaaatctttcatttgcaactgttccgccatacaattgtgtacatacccttaaaaaactaagattaaaatgtaaataaattcagtcaaaaaagccggacaaagcataaaataaaaaaatatgcaaaaaactattgacacaacctttacataatgctataataataaagctgtaaaaaacagcagagttgtatatcgcgggatagagcagctcggtagctcgtcgggctcataacccgaaggtcgtcggttcaaatccggctcccgcaaccaaacaagacggtttttcgaaaccgtcttttctttttccaatatttccgaaaacacctgaaaatggcttggatatgcggttttcaaacgtcaacaaaatcaagttggaaaaagttgagtttaattaaatacagttaaatcgctgtcaaagtgcagtcaatacattaacctaacccgccgagatcgtttccgacaaaaatttcggaggttaaagctatgacaaacacaaaaatcacttacacacagcagggcggttatcttttgcccgatttaaaattacctgagcagccgaaggttaccatagggatatggggacagcgacatctacgctatattgaaaaacaccacccgataagatataccaatcttctgacgagctataaacttactgcttaccttgccggcatagacgaagaagcgcagactatgtatgaacgaattgtaaatgaaatggcaaaacgcgagggcataaccgagcagttgaaagccgaagatatgatgacatgggtaaaatgtatgaataatgtctacgcacgagcaagagagattgtaaatactgaattgatctacatctaaaacaataagtcgccgtgttgttatacgcatacctgcgaggttagaccacgctaattgatttagtgtggtatgttttttcaaaactgtttacaaatagtctttgaagatatataataacctcactacgaataaaaaggagtttggttatgatttgtcaagaatccatcggtagattaatagatatatacaaggatgatgataaaatacttaaaacaattgaacgctgcgttacttcattcgaagaataccatagtagaatatttgagatggagttatggatgaaaatatattctaagaccgtttccggagaagaatataaggaaaatgtttcgctgcgagataaagcgcgtactatgtcgcacgattctattctgggaaatgttaatttactgaacagattagctgaaagaaataaccttccccttgtttatgatggtatcgtgtcacacgaaagaccttatcgcagagaggttgccaatgcggtacttgaatatgtcgagaatcttattaaaaacagaagataa

SEQ ID NO: 7 - DNA, 11742 bp, unidentified
  source 1..11742: mol_type = unassigned DNA
atgatattgactgccgataattgcgaaaaatttatcagcacaatagaaagccttgacggacttgatccttttgcctgccgcataatttcgctttgtacaagttacaatccgcatcttccgtttgtggattattggactgtttttgatgacaaaagcaacactgcaacgggagcaatcgcacgaaacggcacggattttattctttttctgaccgataaaacggatatagacgaagtatcgacttttatgcgtgttgcaggcgcagcctcggtgatttgcagtaataaatacaatctcgatttattcggatacgaaaaatcgcacggccctattcttgtgcgcactgaagagattagcgagaatgacagccttataattgatactcctaagataaaagaggcgtatgaacttattgcaaaggcggcggacaaatattttacaccgccaaagtttgaggacttttatgtggatataaaccataaactgcgccatggcacaatgcggcttctcgggttgtatgacggaaacgaccttgcgtctgttgcaatgactgttgcggaaagcaggcagggcgctgtaatcggtgcggttgcgtgtttaccgaaattccgcaacaaaggatacggcacatacatagtaaatcaccttacaaacattcttgtaaaagagggcaagcgtgtgtttgtgcatagggcagagcaggcaaacaaggcattttacgattatttaaaattcaaatgctttgacagctggagtgaataccattttaaaggatgataaattttgagtttttttgatatagacaacagaataatcgaggcctcgcaaaaggctatggagctttgcaaaagcaaacttgatgaaattaacgatattcaggaatacaatcagcagaagatgataaaagcctttcaggaggcaggggtaagagaaagtcatttttcgggttcaacaggctatggctatgacgatttcggcagagatgctctcgaccgtgtgtatgcctatgcttttgacgccgaggacgcacttgtaagacataactttgcaagcggcacacatactcttacggttgctctttttggtattttaagaccgaacgataccatgctttccgtaacaggtatgccgtatgatacaatccgctcggcaatcggacttgagggcaattatcccgggtcgctaaaagattttggcattaactttgaaatggttgatttaaaggctgacggcactgttgattacgaggcagtcgagcagagaatcagagaagaaaagccgaaaatggtttatattcagcgctcaagaggatacagcataagaccttcgcttacatacagagaaatcaaaaagctttgtgaaatttccaaaaaagcgtcaccaaagtcaattattatgctcgataactgctatggcgagtttgttgaaaaggttactccaatgtctgtcggcgttgatattatggcaggttcgctcattaagaatgcaggcggcggcattgctcctacgggaggatatatcgcaggtaaaaaagaacttgttgagatgtgcgcatacagacttacaactccgggtacgggtaaggaaatcggtgcaacgctcggcaacaaccgtgaactctttatgggtgcgtaccacgctccgtttgtgtcttgcgaggcattaaagacggcagtgtttgcatcggctctttttgaaattctcggttatgatacaacccctaaatacagtgaaaacaggggagatattattcagcttattatgctcggaaacgaagaaaagctttgcagtttctgcgagggaatacagagcggctctgccgtagacagctttgtaaagcccgaaccgtcggatatgccgggttatgaaagtcaggtaattatggcggcgggtgcgtttacactcggctcgtcaatcgaactttccgcagacgcaccgttaagagaaccgtacgcagtatggatgcagggcggacttaatttctgttcgggcaaactcggcgtaatgcttgcggcggataagatattaaagaaaagcgaagaaaattaaaatataatttgacattttatttttaccgaactgctcataatgtatgggcagtttttcttttattaatcatttaaaccataatttaataatcttccaaagcatttaagacagaacctcttttaaataacacataaattccgactttgcataatataccattgtagagaataattattgtgcgggtgttaaaaatgaaaaaatcagagctaaaagcctttggcataattggtggagataaacggcagctttttcttgcaaagtcaatatcagactgttgttacgatgtaattctcggcggttttgataagctgaaaagcctcggtgcgattgaaatatccgacataaaaaccgcaatttcaaaatcagatgcaataattttccctttgccgtcaatttgcgcagacggtacggtaaacacgccgttttcggacaacaaaacaaggcttgacgaagaaatgatttctcttttaaaagaaaagccgatatttgttgctatgaaaaataaatttttaaaagcatatccgcagcttgcagactgcgaggtttacgattattcggcaaaagaggaatttgcggttgccaatgcgttgctcaccgccgagggagcggttgaaattgcgatgaatgagtacgagggtacgatttttgacagcaaatgccttgtttgcggatttggcaggataggaaaaatgcttgcaaaaatgatgaaatctcttaatgcacaggtcacggtaagcgcaagaaacgaagtcgattttgcgtatatagaggcactcggctgcaaacacatcaacacaaatgctctcaaaagcgtaaagggatacgaccttgttttcaatacaattcccgttatgatttttgacagcgacttgcttatgaacacagaccgcaacaccattataatagaccttgcctcacttccgggaggagtggattttgaggcggcacgcaggtacaaaaccgatgccgttcgtgccttgtcattgcccggcagaaccgcaccaaaggcagcgggagaaattatcagaaaaacgatttttaacataatcaaggaggtttacaggtgacaaaagcaaccattggctatgcaatgtgcggttccttttgcaccttttcacaagcctttgaacaaatgcagaagcttgttgattcaggctacagggtacttccgataatgtcaggtaacgcctactcaacagatactcgatttggcaaggcagaggaaatggttaaaacttgcgaggatataacaggagaaaaggtacttcacacctcggtgcagacagagccgataggaccgaaaaaaatgtgcgatttacttctgatagcaccttgcacaggcaacacacttgcaaagctgtcgctcggcgtaaccgacacctcggtaacaatggcggcaaaatcacatctgcgtattctgcggcctgtacttttgtgcgttgcaacaaacgacgcgctcggagcgtctgcgcagaacataggcagacttatgaacacaaagaacatttattttgtcccgatgaggcaggataattgtattaaaaagccaaattcacttgtggctgatttttctaaaatagaagaatgtgtagagcttgcactgcaaggcaaacaacatcagccgatatttatatgatacaaaacgacagttccgatttctgaataagtcagtcaaaaacggaaaatatacaaaacgaccctttacggtataatgcaatcaaaattaccgtaaaggggatttttatggcaaaaaagtgttttttataaataattggcacgattgccgatatattctaaagacagaaaagaagagaatgacttatgaaaaagataatttttgataatattataaaatatattgacaaataccgcaaaacgcagtaaaatttagataaaaataacagcaaatctttcaaaaatttttgctattattgagaattattttcttttttatctgttaagccgagtatataatcggtgctggtttcaaaatgctttgcaagggcgattagtatagatgtaggtatatcacgctgaccgagttcgtaattactatatacttgctgagaacagtgaagaatagcactcatttgtttttgagtcaaatcggcgtcttcacgcaattcccgtatgcgtctatacataattgtatcacttctgttttagtatagcataccgcacattgttgtattaataattactgcaaaatgcagtaattattcaggctttaacaaaaaatattttttacaaaggagagattgtaatgaaaaaagcaaaaagattaacagccgtaatactgtctgcacttatggcagtaagtgcattttcagcactgcctgtaagtgcggctgaggttgaaagtaatacttcggctgtgtcttcagatgaaaattttataagcggtgactatgagtattcattacttgatgacggtacaattgagatatccaagtatgtgggtaatgatagtgatgtaactattcctgatgaaattgacggaaaaaaggttacgagtataggtgaatgggctttttccagccttttaaatttaaccaatataactattccaaatagtgttataaatattggaaatggtgctttttccggttgcacaaacttaacgaatataacaatgccaaatagtatcaaaagtataggagaaactgttttcttaaaatgccaaaacttagtaaatgtaacaatacctaacagtgttacaagtattggtacttgggctttttcaagttgcaaaagcttaacaaatataacgataccaaatagtgttacaagcgttggtaggtttgctttttatggttgtgaacatttagcaaatatagcaatatcaaataatattactgttattggaatggatgctttttatgatacagcctggtataataaccaacctgacggtatgatagtggcaggtaaagtgttgtataaatataaaggaagtatgcccgaaaacacaaaattaattataccgaatgagattgtttcaattacagatgaggctttttatgattgtgaaaatctctcaaatgtaataattccaaacagtgttgcaagtattggaaatcgtgctttttatggttgtgaaaatctattaaatgtaacaattccaagtagtgttgcaaatattggtcatagtgcctttgaatattgcgaaaatttagaaagtattaatattccttatggtattaaaagtattgaagatggtacttttaaggactgttcaaatttagtaaatataaccattcctgagactgttacaagcattgcctcccatgcatttgaaggttgtatgcgattagaaaatatatcaattcctgatagtgttgttgatattggcagatatgcttttaattgtacagaatggtatgataatcaacctgatggaattgtatttgcaggtaaaatattatataactacaagggtgatatgccgaaaaacacagatattattatttctaacggaacaaaagctatttcacagggtgcctttagtgattgtgtgaatttaagaagtatatctatttcgaacagtatttcaaatatcagtagtgatatgtttagtggttgtacaggtttaacaaatgtattcattccaaatacagtcactgaaataggttataatgcttttgaacattgctcaagtttaaaagatattaatattccgaacagtgttacaagtataggaaacagtgctttctattactgtacaagtttggaaaatatagtcatccctgttggtactaaaagtattggaagtaacgctttttacggctgtttaaatttaagtagtgtaacgattcctaacaccgttacaagtattaatgaagcagtattcgaagattgtacaaaattaaaaagtatagtaattcctgaaagtattaatgctattaagtcgtttgctttttctggttgtacaagtttaaaaactattataattcctaaaaatgttaattttttgggacataattgtattggttattattatgatgaagacagtcacgattacttaaaaattgaaaattttaaaatttacggttacaaaaatactgcggcagaaaagtatgctcaagataatggttttgaatttataagtcttgcagatgatataatattttctgataaatctacaggtataaccgtcagtggtgttatgcaaaatgatgctgttttaaatgtaactaaacttgaaaacacatttaaaaattcagttgcaacatatgacataaccttgcaaaaggacggtgctgttattcagcccgacggtacaattactgttaaaattccaagcagtgcagaaaattgtaaagtaatgtggctaaagggtgacggtacagccgaagatatgaatgcaaaatatacagacggctgttatgtatttaccacagaccatttaagcgtttatgcattggtacaggataaaacaattctcacaggcgacgcaaaccaagacggcattgtaaatgtaaacgatgttacatacttgcaaatgcacattgcaggcaaaaaaaacaccgacggttcggcgcttattgacgaaacaaacaagcagttgtttgactgcgttgatatgaacaaagacggcaaactttctgtttctgatgtaacagcattgcagattcatatttcagaaaataactgataggagagattacaatgaaaaatacaaaaagaataacagcaataatattatcagcattaatgaccgtaagtgcattttcgactttatctgtaagtgcggctactgttgacagcaatgcacctgttgctttggcggatgataatttagtaagtggagattttaaatactctgttcttgatgacggtacagttgaaattgctaggtatgtaggtagtgatactgatataaccattcctgatacgatagatggcagagatgtcgcaagtataggtgatgaatcattttcaggtatgtatatctttgaccgtgatgttataataaccgttaatcttcccactacactaaaaaatattggggaaatggcattttgggatgataatataaaggaaataactattcctaatggcgttgaaacaatcggcgacggtgcttttggcggtacagctttagaaaaactgtttataccggagagcgttaagtactgcgaccatttattcgattttaatagactaaaagaaattactgttgacgaaaacaataaaaattattacagcaaagatggatgcttatttagaaaatcagataatgttctcttattctatcctaatggtaatgaacgaaccgaatacacaattcctgacggaacaacagggatagattattatgctttctttagaggaacggcaaaattaaagacattgactataccgggaagtgttaaaaccttaaaaaagtggacagctgctcacagtaatcttgataaagttattttaaatgaaggtgtggagagtattttgaaacatgcctttgtaaattgtaattttaaggaaatatatattcctaaaagcgtaaccactattgaagaattagcttttggatatgataatatggacagcttgagtcctcaaaaaattgaaggctttaaaatttacggctacaaaaatacagccgcagaaaaatatgcacaagataatgaatttgaatttattgcattggatgatgaagtcgttacaggcgactcaaaccaagacggtatagtaaatgtaaacgatgttacatatttgcaaagacatcttgccggcagcttaaatacagatggttctgcccttattgacgaaacaaacaaatcattatttgattgcttggatttgaataaggacggcaagctcaccgttgcagatgttactgctttacaaatttatatttcagaaaataactgataggagagattacaatgaaaaatacaaaaagaataacagcaataatattatcagcattaatgaccgtaagtgcattttcgactttatctgtaagtgcggctactgttgacagcaatgcacctgttgctttggcggatttccaaagtcaaaacgatattaagtggaatattgatttaaacggaacacttcacattagtggaagcggaattatcaacgaagatgaatcaagttatgacgaagaaggaataccttggtatgaggaccgcaatcgaattaagaaggttatagttggtgagggtattacaggtgttggaaattatgcgttttgggattgctgtaatcttgaaagtatagaaataccggaaagcgtaacatatattggtgtgttttgctttttgctcgatactaagctttatagtataaatgttgatagcaacaataaatattactcaagcgtagatggaattttgcttaataaagataaaacagaaattgtaaaatatcctaataaaatgcaaagtacttatgacataccaaacaccgttactgacatattgccatatgcgttcagagatgatacaaatttacagtatatatcgttgccgcaaaacataacaacagtgggctacggtgcgtttatggattgccctaatttggtaaaggtgactttaccaacagaattaacaactatcgattctgacgcatttggatacttgtttagaatgggtggaaatatacatgtaaatgattttaaaatttacggctacaaaaatacagccgcagaaaaatatgctcaggataatggatttgaatttattgcattggatgatgaagtcgttacaggagactcaaaccaagacggtatagtaaatgtaaaggatgttacatatttgcaaatgcacattgcaggcaaaaaaaacaccgacggttcggcttttattgacgaaacaaacaagcagttgtttgactgcgtcgatatgaacaaagacggaaaactctccgttgccgatgtaacagcactacagattcatatatcacagaataattaaataacaacaaatcctttcttgataaggcggcaggcacagacttgccgccttttgctttgtgtgtgaaaaatttgaattttgcgtaaataaaaaaataattcctataaaatcacaaatagtttacggtgaggtattgctacatatgcttttttgtgataaaatggtaaataatacgaattgcaaataaattattgtgatattttttataaaaaaaggaaacatttttatgaagctatgtactaaatgcaagcatttgcacaatgatgaggacgcagtgtgcagtaactgtaattctcctcttgagagcattaccgacgagaatactcccgtatatctcctttctgccgagggatttgagcttgagcgtgttaaaaccgcacttgaagacaattctatcccttgcgacagcgttattaaggacaaacagcttaaaaagcaggaatttataaataaaaattctgccgaaagcgatattttggttccttatgccgcatatgaaaaagcctacgatatatgtataggaatcggcgcaattaaagaagatgatactcaggttcttgaagatgcggttgagcaaaaaggcagtaacgagcctactcttgacgaaaaattcgaggagatgagcggcgttaaacgcacaactgtgagagttctttcagccattgcttttcttgcgcttgttgctcttgcagtgtacggcacagattttataacgggttttataaaaggtttatttggttaaattaattattttggaggaaaaactatgaatattgaaacaaaatgcgtgcaggcaggctggcagccgcacaaaggcgagccgagagaattgccgatttatcagagcactacttttaagtacgacacaagcgaagaaatgggtaaactctttgaccttgaggcagagggatatttttacacaagacttcaaaaccctaccaatgacagcgtagccgctaaaatctgcgctatggagggcggcgtggctgcaatgctcacttcaagcggtcaggctgcaaacttctttgctgtgtttaatatctgcgaggcaggcgaccatcttatcgcctcatcttcaatttatggcggtacatacaatctctttggtactaccctcaagaagatgggcattgaatgcacatttgtagaccaggatctacctgaagaagaacttgccaagctctttaagccaaacactaaggttgtattcggcgaaacaatcactaatccgactgtttctgtttttgatattgaaaaatttgcaagacttgcacattcgcacggtgttccgcttattgtagacaacacatttgccactcccgtaaactgccgtccgtttgagttcggtgcagacattgttactcactcaacaaccaagtatatggacggtcacgcaacagcggttggcggctgtattgttgacagcggtaattttgactggcttgctcatgctgacaaatatccgggacttacaactcccgacgattcataccacggtattgtttatgccgagcgtttcggtaaggcggcttacatcacaaaggctacttcacagcttatgcgtgacctcggtgctattcagtcaccgcagcacgcttattacctcaatatcggtcttgagtcacttcaccttagaatgaaaaagcattgcgaaaacgcacttgccgttgcaaaatatcttaaaaacaacgaaaatgtagcgtgggtttcctatcctgaccttgaagacgacaagtaccacgagcttgctaaaaagtatcttccgaacggttcttgcggtgtacttgctttcggtatcaagggcggcagagaagaatcaataaagtttatggattcgcttaagtttatcacaatcgttactcatgttgccgacgcaaggtcatgtattcttcaccccgcaagccacacacaccgtcagatgacagacgaacagcttattgaggcaggagtagctcctgaccttatccgcctttctgtaggtattgaaaatgcggatgatattatcgcagaccttgcacaggcgtttgaaaaaatttaaaaattatactcgggagttgattttatgtcagcttatgtttctgctgtaatagttgcggcgggcggctctgtaagaatgggaattgcagacagcaaacagtttattccgcttcttgacaagccggctattgaatatactttaaaagcatttcagaaatgctaccttataaaagaaattgttatagtttgccgtgagcaggatgttgaccgcattaacgaacttgtaaatcaaaacggatttacaaaggtcagcaaagttgtgctcggcggttcttcacgctccgcaagcgtgcgcaacggcattaaggcggctaatgaaaaggcaaaatattttgctattcacgacggcgcccgtccgcttattactgttgacgaaatcgaaagagttgttgaggcggcttttgaaaccggtgcggcaaccctcggaacatccgttacggatacaatcaaaatcgttgacggatttaataagattgagagcacaccgctccgctcacagcttagagcagtgcagactccgcaggtttttgaaagagatttgtatatgtttgctcttgaaaatgcaggagaaaacagccttgaatttaccgacgactgcgctcttatcgaaaatatgggcggcgaagttctcgttgtaaagggcagtgaagaaaatattaaactcaccactcccgtagatgtaattcttgcggaaagcatacttaaaaaccgcattaagaacggtaatttctga

SEQ ID NO: 8 - DNA, 9120 bp, unidentified
  source 1..9120: mol_type = unassigned DNA
ctaattcttatattctttgcttatgactttgcagataacataaagtctctgatctgaaagacccatatagccattgttccagcaagtgtagagtatcagatcatctacaggcggatctgcggtcacatcataatacaaaagggaagtatctgtatctggaagtaccttagtttctgtgacctcataagtgaatttgccataatccgtttttagtataactcgatcacccactagaacattaggtaaatatctgaaataagtgtggttatgtgccgcaaggacaactctgcctgtagcacctatatatgcagaatagttagattgcacaactccttttgctaggagatcatcagagtctccccagtaaacaggctctttgtcaatgcctgccctatcattctttacggtcagctcggcatatttgtcaccgtaatacggatagattatctcatgctgttccgtctttttttcagaatcaggcactgtgacctctgtcaattctttcataggcagtgcgtctgtatttctgtatttgttatcctcagagggatttttcaaatgtgcattttcattgaatgctatcgatgcgtatccttgcagttctatgaattttttatagcttgccagcgtcatgatagacaaacaaagagccaaaactaaaagaggcgtcaagaccattacagccactgacgtcctcttattttttttcagtttgtttgcgtcagccgaggaagctttatcctcttttctgaccatatcttagcactctttgttcttcttaacagctactgtaataccaaatgcactaagagcaagtgtaagaacagcagcaacctgaacagctgtcatgctgtttgcaccagtattaagtgaaccgctgcctgtgtttgttccaatgtttgtattgccatctgaatcaacgacctgaacgttccaatccttgcttgtaagctcatctaccttgatagtaacaccaaagtgtttacctgtagctacgcaagcatcagcaatagcctttctgctatcctcgcccatttccttaaacacctgtctaagctgatcgtttgttagtgaagcaagatctgttcctgcaccaaaaagcttgtcagcaacaggctgaacatatgtagcaccacaatcagagagagcctttaccatgtaatcatagtcagcagagctgaactttgaagcgtgagaatcaaggtagttcttaagctctgatacatggttagaaggaacacctgctgatttagctgcagaaacaacatcagcagaagaagctgctgatgcgctcacaaccattgttgaagcaatgatgaacgcagtaacagaagccgaaattgacttaaatatctttttcataacacctatcacctttcgtaataatttcgtataacaatattatacactattaaaattcgattgtcaatatttttattggtatttttttcagaaaaaagcaaatgtttttacgataatttgaaatagttatgtataagtgcgtatatgcgctatttcatgtaattgtatattgctggaaaatacaaaagattttcagcattctcaaataaaagacttataacattactgtattggtgcttttatgatttttgtcaaagctgatctcaaagcatttagatataatttctacattatttattataattatacgccttgacacgatatcatgccatggtgtataattcttgtgtatgatataattgatataatgtgcaaggaggatatatgaaaaattatctcaatgaaagcctttcggctcaggaaagagctgaagcacttgtaaatgaaatgaccgtagaggaggcggcttcacagcttagatatgacgctcctgctgttgagcggctcggcattcctgcctataactggtggaatgagggtatccatgggcttgcacgaagcggtgttgccaccatgtttccacaggcaataggtcttgcggctatgtttgacaccgaccttgtgttcaaagtggcagatataacctctacagaagctcgtgccaagtataatgagtattcaaagcgtgatgacagggatatatacaaaggtcttaccctttgggcacctaatataaatatattcagagatccacgctggggcagaggtcatgagacttacggtgaagacccttatcttaccgcagagtgcggcaaggcatatgtaaaaggcttgcagggcagtggcaaggtactgaaaactgccgcttgtgcaaagcactttgcagtacatagcggacctgaggctgttcgccatgaatttaatgcagaggttaattggaaagaccttgaagagacctatctttatgcctttgaggagcttgtgaaaaaagcaaaggtcgagggtgtaatgggtgcgtataatcgtgtgaatggcgagccgtcatgtgctagtgagtttctaatgggcaagctcgacaaatggggttttgatggctattttgtttctgattgctgggcaataagggatttccacgaacaccatatggtgacgtcttctcctgtagagtcggccgcaatggcacttaaagcaggctgtaatgtgaactgcggttgtacgtatgtacacctgctttctgctcttgacaaggggcttgtgacagaagatgaaatccgagcttcctgtgttgctcttatgagaactcgcataagacttggcatgtttgacaagtcaacggaatatgacaacataccatacagcgttgtttcctgccctgagcataaagctgtatcttaccagtgtgcagtgaagtccatggtgttgctcaagaacaagggtattcttccgcttgacaaaaaatcaatatcaactattgctgtaataggaccaaatgcggacagcagagcggctctcgagggcaattataacggcacagccgacaggtatgttactttccttgagggtatcgaggacgcatttgatggcagggtgctttatgctgaaggctgtcacttgtataaggacagagtatcgggtcttgcacaggcaggagatagatacgccgaagctgaggcggcagcggcaaattctgatgttgtgatactttgcgttggtcttgatgccactattgagggcgaggagggcgacacaggtaatgagttttcatcaggtgacaagaacgatctaagacttcctgaaagtcagcgtgagcttataaagcgtgtcgcaaagatcggcaagcctatgatagtggtatgtgcggcaggaagctcaataaatatcgagcatgattgtgacgctcttatccacgcatggtatccgggttcagagggcggcaaggctattgcggatattatttttggtaaagtgtcgccatcaggaaaactgcctgttacattctataatagtgccgacaagctaccttgctttactgattatgctatgtctgatagaacatataggtacactagagataacattctttatccattcggctatggtcttacttatggagatgttgttgttacatcgcttagttatgacgatggcaaagtcaatgtagaggtagaaaataacggtgccgatacatgtgatgttatcgaactttacattaaatcacattgtgataatgctccggcttatcctgtgctgtgcggcttcaagaggatttttgtcaaaaaaggtgaaaagcttgatgttgaaatcgaaatacctgacaaagctttcacaacagtgtcagatatcggcgagagaaaacagtttgcaaaggaattcaccctctatgttggtacgcatcagcctgatgaacttagttgtcagcttagtggtacaaactgtatgagtatcgagatagaacgataatgaaaagagatcttacaaacggcagtatcataagcttgcttcttgctttttcaagcccgatgatactgtgaaatctgctccagcaggtgtataaaattgccgacacatttattgttggcagatctcttggcgaaaatgcccttgcggctgtgggcggcacatacaccctcacgacttttctttattcgatcataataggtctgtgcatgggctgtggctcgcttgtttcttattgtttcggtgaaagaaacgaacaccgtctgaaaggctgtctgaacatatcatttctgatgataggctctgttactttggtggcagagcctatcacattgtgcttttccgatgagattttgaaacttttgcatactccaatgaaaataatgttgttgacatctgatcatgttagaattatcctggcaggtgtgggactttgtttttacactctcgccaaagaacctcttttgcgactatccttcaagaaaaaatcttggaaggattgcagttttggtgaagtggtgcgaatgccgaccgctgcctcagttcagcaatctgtcatgaatttcggcatacttatgatacaaggactggtaaatagttttggaacggctgtaatggcggcttttacagtagccgttcataattgttaaattaagctgtcagcttatatgattttccaacaaatacttggctgattttgtttatcttattgtatgttataacaaaaaaccaaatttttgttgaaatacaaaaaaacgtatcgtttaaagttgactttttgaatagaatgtgataaaattattattgtacagtttattttttggaaaaataacgaaattatcaacaatagggtgaataatacaaatgaaaaaaaattacactatcaaggatcttctggtacttcttctcggaaaggtttggtatatcgttgccgcttcaatagtgtgtgcgatactggcccttttcgtatcaaaatttgttatgagtaagcagtatcagtcacacgtttcaatgtatgttaaaagtgctgataatcaatcaacgggtcaggataagactaatgttgacttacaggatattaacgcttcaaagtcattggtacagacctacattgttatacttactgatgacccggtaatgaacgaggtaagtgataagcttcttgagatgtatactcctgaacagcttgctccttattttactgtaacaagcggcagggtttcaaatgatggtctgagaaatgcttatagcatgaccgctgtaaatcagacagaggtacttcagataactgccacaacaaccaatgcaaagctttcttctgacctttgtaacatcatggctgacgtcgctccaagctttcttataagagttatcggtgcaggctcagttgaaaagataggtgatgctgaggtttacaatacacctgtttctcctaacaccactaaaaatgttgcccttggctttgttggtggcttgatggtggctgttctagtgatacttgttatcgacttcttcgacaacactgtaaagaattctgatgagcttggcgatatttatcagaagcctatcgttggtgagataatgaatattggcggaaagacttctaaaaaggatgaaggttcttctgctgacagaaaaaaacagcttctgttcaacaataaggatataccgtttaatattgtagagaactacaaaacaatgcgtacaaaccttatgtttacgctttctacaacacgaaataagatagttgtcgtttctagccctaatccaagtgagggtaagtctgtaacagttgcaaaccttgcagcttcaatggctgaaacagaaaataaggttcttcttattgacgctgatatgagaagacctgttcagcacagaaacttcaagttaaaaaacaatgttggactttcaacaatactgagtggtgaaagcacatttgataagtgtgtgcatgaaaccaagaatggcaattttgctgttcttacatcaggcgttttgcctccaaacccgtcagagcttcttgcttctgagaaaatgcgtgaattgcttgaatatgttcagcataagtatgattatgttattgtcgatggaactccgctgcttcctgtaactgacgtaatgagccttgcagacgaggtcgcaggcgttcttcttgtggcaagatatggcagaactacatatcaggagatagaggagtctatgaagaagcttgagataggcgattgcaatctgcttgggttcgttcttaatgatatttccgcaaagaacggttctcattacggatacaagtatagctacaagtataaatatgactacagctataaatacggtgtgaaggatacttctgccgaaagttaaatgacatggagatgttagattgactaccgattatcacagccacatactgccgaatattgatgacggctctgacagcatcaaaacatcacttaaaatgataaaaatgatgaaacagcagggcataggtataattgtggcaacaccgcatttttatatgcacagggaagcttctttagacagttatcttgtcaaacggcaaaatgcttatgagaagctcatggcatctgaccctgccgtgaaggatatacatattggtgctgaggtggctatagaaaaaggcatcagcgtattaggagaacttgaaaagctgtgtatcagcggaacaagacttattcttcttgaaccaccattcactcagtataacagttggatcgtcgaggagatagacgagatagcaaattctcgaaggcttattccgataatcgcccatgtacatagatatatgggcgtttattcaaagtcagatctgaaaagtctgatgtctgtggatgcagtttttcagataaatgcagaagcttttgagcatttttccacaagacgttttgttaataagcttatttcaagtggcagagattttgtctttggaagcgatgctcataatcttgatgatagaaaacctaattttgatcttatagctaaaagatctggaagtgaaaatataagacgttctgataaagtactcatgtctgctatggctgacgaagaaagaatgtttgctttttaagtatagaaaaaatattgatgatattataaatagcctgcactgtgccattgaggggtggccatggtgtgatcttattcattgctttaattgagcggaggtatgttttatttatggagaaaacaagtgaaaacacagttcaggtgtggaaaaacaaaaagataaagcattggatgcttattgcattctttctgtgtttctatgatattgttgccgtaaatctatcctacattttcggacttttcatcagatttgaccttactttttctgcaataccaaaggagtatatgcttgcctatgtaaagtttgctccaatatatacagctttctgtgttgtggtgttttttgtgttcaagctttataatagtttgtggagatttgctagcattggcgaactgtcaaggatatttttggcctcgatagttactaccatatttcaggctgtgggtataacattactcttcatgagaatgcctgtggcttactatatagtaggagcgggaactcagttcgtgcttataacagcagtgcgttttgcctatagatatatcacccttttaagagcaaaacaggtaacaaatcaggtggcagtgcataatgcaatggtcattggtgcaggtgcttcgggtcagatgatccttaaagagcttacgatgtcagaacgtgcaaatgcaagaccactctgcataatcgatgataacccaaataagtggggaagaaatatcggaggagtccctatcgtcggtggccgtgattgcattatggaaagcgtcaaaaagtataatattgatcagatcctttttgcaattccaactgcatcacctgagaacaaaagggatatccttaatatttgtaaggaaaccggctgtgagatgaaacagcttccgggcgtttatcagataacaaatggtgaggtgcttctcagcaagatgaagcctgttgcggtcgaggatctgcttggaagagagcctatcagagtaaacatggacgagatattccagcaccttaaaggtaagaccatattggtaacaggtggcggtggctctatcggaagcgagctttgccgacagatagcaggtcatgagcctaaacagcttatcatatttgacatttatgaaaacaatgcttatgaaatagagcaggagcttaaacgtaaatatggcagtaaactcaatcttgtgacgcttatcggctctgttcgtgacagcagacgtatcaatgacgtttttgaaaaatacaagcctgatatcgtttatcacgctgcagcacataagcacgttccgcttatggaaacaagccctaatgaagctatcaaaaacaatgttgttggtacatacaagacagcctatgccgctttgaagcatggcacaaagaggtttgtgcttataagcactgataaggctgtaaacccgactaatattatgggtgcaagtaaaagactctgcgaaatggtcatccagagcatggacgctatcagcaaggcaggcagaactgatcttctacctatgctccatgcacacgttgatgaaatgacagacggtatgcttgagaacgatccgatagacgagatagctgttgataatatagagagcagtgaagcggttaagatcgaaagcgttggcaataaggacagaaatggcacacagtttgttgcagttcgttttggaaacgttcttggaagcaacggctctgtgatcccactgttcaaaaagcagatagaagcaggtggtcctgttactgttactcatcctgatatcataagatatttcatgactatacctgaggctgtgagccttgttcttcaggcaggcacatacgcatggggcggcgagatatttgtccttgatatgggtgcgcctgtgaagatagacacacttgcgagaaatcttatcagactttcaggatataagcctgatgtagatattaaaatagtttactcaggtctgcgtcctggcgagaagctttttgaggagaagcttatggcagaggagggcatgatgaaaacggataatgagcttatccatatcggaaagcctataccgtttgacacagaaacgttccttggtcagcttggagagcttgctcgtgcaagctataacaatgacgaaaatatcgttgaaatggtcgaaaagattgttccaacattcagtcctgtaggtgataaaccaacaggtaatgaaaaatatggcagaaacgatgttgcagtttctgcggcaaaataa

SEQ ID NO: 9 - DNA, 14677 bp, unidentified
  source 1..14677: mol_type = unassigned DNA
  misc_difference 29: note = a, c, g, or t
  misc_difference 30: note = a, c, g, or t
  misc_difference 31: note = a, c, g, or t
  misc_difference 32: note = a, c, g, or t
  misc_difference 33: note = a, c, g, or t
  misc_difference 34: note = a, c, g, or t
  misc_difference 35: note = a, c, g, or t
  misc_difference 36: note = a, c, g, or t
  misc_difference 37: note = a, c, g, or t
  misc_difference 38: note = a, c, g, or t
tcaccatgccgtcgtcgcgcaggaagcgnnnnnnnnnnccgccgtacctgccagaaactcatcctgaaccagccccctcgtctccgggggcatgcccgcatggtaggacttgacggagaaaccggcttttcccaattcgtaggaaaggttttccgcatctttgcgggtccgcgtgtacaccacggcaggacggcggcctccctctttcaacaattcaaccagccgcgcggtcttatcctgatccttcaacgtttccacctggcggaagatattcgcacggtacggcgcagcccggaaaatacattcatcactcacgccaaacaggccggccagatcgcggcacacccgctccgtagccgtggccgtcaacgccatgacgctgcggaacccgtgctttctgaaaaaaacgggcagccccagataatccggacggaaactgtgcccccattccgaaaggcaatgggcctcatccaccacgaacaagccggggggaacaagctccatggcccgctgaatccacggggattccagagactccggagcggcaaacagaaggcggacgcctccggacttcaatctgtccatcagggaggccttatcttcctccgccagggtcgaatcatacctggcggcggccacgcccagtttttccagacccgccacctggtcgcgcatcagggcaatcaacggagaaaccacaaccgtcagcccgtttccaagcaccgccggaatctgatagcaaaggctcttgccggaacccgtaggcaaaataccgatgcaggaacggccctccagcgcgcactccacaagctccctctgcatgggacggaaccgttccttgccgaacaaacgcagcgtgtcttccagagcagaggaaagcatggggcaaaaataccataatgcagaatcccggcaaaaggaatcctatgacattgacacggcgccgtcatcctatatcctccaggcaatatgagacctttgaaaaccatcatcgccggaactctggccctgctggcggcagctcccctttcagcccaaaccagagctgaggaaaataaaaaaccgaatatcctctttatcattacggacgaccacgcctaccagacgctgggcaccggcaataatgattcccccgtggccctgcccaatttcaacaaactgggacgccaaggcatggtttttgaccgcagctactgcgccaactccctgtgcggcccctcccgcgcctgcatcctgaccggcaggcattcccacatgaacggctttgtcttcaacggacaaagaccgctggacggctcccagcccacctacccgaaaatgctgcagaaagccggataccagacgggccttttcggcaaatggcacctggaatcaaatcccaccgggttcgacacgtgggaaatcttccccggccagggcagctactacaatccggactttatcagcctcaagccggacggcaaacgccagacaaagcgttttcccggatatgccacggacgtggtcacggacaaatccatccagtggctggaaaaccgggacaagaacaagcctttcctgctcgttgtgggccacaaggccccccaccgcgcctggtgccctgctctgcgccacctgggcaaggtggacacttccagcatgacgccgcccgccaacttccatgacgactatgccaaccgtccggaattcctgaagaaaaaccagcagacagtcgccaatcacatggcgatttattccgacctcaaagtgcttaaggaccaggttccggaagaaatgcgcaaaagcatcgtttcccccggttacggctgggacctgggcgagttgaaccgcatgactccggaagaaaagaaaacctggacggactattacgccaagcgcaccaagtccctggtggacggcatgaaatccggaaaactgaaggacccgaaagcgtttgcggaatggaagtggcatgcctacatggaggattatctgggatgccttctgtccgtggacgacagcatcggccgccttatggaatatctggacaaagaggggcttgcgaaaaacacgctggtcatctactgcggagaccaggggttctacatgggagaacacggcatgtacgacaagcgctggatttttgaagaatccctccgcatgcccctcatcatgagatggcccggcaaaattcccgcgggcatccgcaacaacaccatggtgcagaatatcgactacgctcccaccatcgtttctgcggcaggggcggacactccggaaaacatgaataccttccagggcgtatccctgcttcccaccgctttcacgggcaaaactcccgacaactggagggatgccatttactactgtttttacgaaaatcccggcgaacacaacgccccgcgccacgacggcatccggacggaccgctacacgctttcctacatctggaccagcggcgaatggatgctctttgacatgaaaaaggatcccatgcaaatgaaaaacgtcattgacgatcctgcctacaaggctacggtggaacagctcaagaagcgttaccacgaactgcgcaaaacctataaagttccggaaaacagccccggaggcaaaggaacgcctatccccaaattcgacgcttcctggtaaaagccacacgggaaactgcctttccaagcgccggtttttccggcgctttttttattttcgtccatagcaggccggagagatccgtcacggaggccgaaacaggcaaactccccttccgcacacaaccgtccatcaaccgtaaaacccgcggaggggtctcaagcccgccagcttcatcaatttattcatggctttttcatacaggaaaaacgcctgttgcatgcagcaaagcacgggcattaagggatgctccgctttctttgcgccaagctcttccaaaaaccggtccgggtccttgtcgtcaaaaccgggatgccgctcaaacgcccggcggccttccagatgaatgacgcccttcccggaatacaggcagtccagatgatgttgcgccgccacgagagacagcagcgtctgatcgtgcgtatgagctacaaaattatcgcggcaacggctctcttcttccgtagtggcggaagacaccaatttgaactgacggcacaaatccatccattcacggagaattcggaggctttgttccgattttttcaagaaaaggaaggagccctgaatcaggggagcctgttcaaaatacccgctatccagcttcaattcatcaaaaacgctctgcttgcaccaccgcgtaaggcctcccgtataataggaaatattcacgcccggcatcatatcctgccccttctcccggagccattggacaaacggctccaaggaatgatggaaaagcctccccggcgggcgccccgcatccgtataaagcaggtaatccccttcctccaaatgttccagctccttgagaatgatgaagggtttccatacccaaaacccggcgccctgtaaattcgggtcaaaccatggaatagcttccctgattccttccctctccaggcgattaagattccaacaggacaacgccactgaggaatccgccagcctcaggctcatcatctgcatccattgccgcaaatgatagccgcgggtcgcgaaagaacaataacggatagccatactcccagattccggtggaaaccatgtccctaaaaacgggaacacatcttctgcgtccgtacctataacgagttgtaaatccgctgtcaatggaaaactttaacggagaatcatctccgtgcatggaaccacggattgaaacaggatttttttaattaccaaaaaaccattcaacacgataagttatttatagttatctttttataactatatctaaacttttttaaaaacaggcggatttacaatcccccgttcaaatacaccacaatgtccagaatttgacttatccccgtggcatctgctccgctgccagccttttatccaaatcaagagccgcgccaatggccgcatccatattgtagtattcccactccgcaaaacggcctaataaataaatgcctttcggttccaagcgctcctttagttcccgtatgagggttcggctggaagcatcctgaacgggataggtatattcttcccagtgatgggccagatacacaggggaaaagggaataagctccagctggcgcctgatttccccttccgtcatttgctcggaaaattcaatagtcgcggtggtgatgtccccgttattattatttctggaaaaattccccgtgcaaatgatccggtgggaacggtgggacggagagggcatgtaaatccagctgtaatcattgggggaaatccggcaaagcacggaagtggttccgtgagagcgcaattctgaaatccgggggaaaaacgggcgcaattcatccacgcaggggaaacaatccccaagctgcctgacattccccgtaaagacgactctgtcaaacaattctccctgcacgagccatttcccgtccttcgggaggatatttacagcttcctgccggtacctgaccttaaggccgcgagccagcgtatccgccagaaactgggaaccgccgtttttcgcataaaagaaagaactgtgcaccatggcgctttcattgatgtgcccaatattgttcaacaggatttccgccacgctcggcatgggaagcttgtcttccagccaatccatggcaatttggctgatatcctgcctccacactttgttattgtacggcgtgaaataaaggttgttcagggtttttccgaaacggttcagaaaaaactcacccagggagcggggctccgcgggaggattcctgtaaagttccagcagctcatggacgatggaggaacggacggcctcgggaaactggtcgaggtggttctcaatgggataatccaccacatccccgccctccagggaaatgacagcccgtcgccgggcggaaacaaaatcgcgctccctgtcaaaccgggaccaaaaccagtccagcacttcctgccgccgggaattgaacacatggccgcccacacgatgatacaggttcccctgtacttccgtgcatttaatcaggccgccgggccgggaacccctctcataaacgaccacctcatgccctttcttcagcaacattccggccatggacaatccggaaaccccggctccgatcacagcatatttcatcatgggataaaaagaccaatttattgacgccactatctggcgaagcgggacaatttcacgggatggagatacaggtattcctccggaaaggaggcaagcagcttgccgaggtctcctccggaagaggacacgagcccgtcaatgacggcattcatggcttcaaagtgttccggatcctggggaaaccagacgtttcccgacttgtactgagtgtcctccagcgtagccagctttgttccgggaagaagctgcaacgccgtgggaatggccagctccacaaacatgttccatgcggagaacacttcaaggatacggcagaaatcgtccaatttccctttcggaatgcagacaatgtccgaatatccgaaaacgacaggataggaataccggtattttttaatccggtgcttccagtaattcagcagatgccataccctgcccttcaacactttccaattcgcatgaatccccccggagctccatttgggcagaaacatgcgtacgcgcgacaattcatcatgccgcatgaggttcctggattttaaaatccgcctggcctcctcataggacggaacgttcctgttgacgctttccgcatcaataccgggaggggttatggaaaaatggtgggcttccgccgttccccggtaacacaccggaagagaaacatccacaaaaccgtcaaggtaacacgtatcctccccatggattcccagcagggacggcgttgaaaattcgtcaaacctgggatttaaaagaagatcgtctccgataataagaaaataatcgccatccaaccgcctgattctttccctggactgcaaaatataattatagaactggaaagaattcccgaagacggaacatacgtcaggggcatctcccttgtagtagggcattaattgaagcaacccggaaaagcgtcttgaataaagctctctgattaccggaatgttacgttcatactgatggttgaacaacacaacaagagacgttttccgggaagaagtatccatggccgtttgatgttgagaaacaaaccgtacccttcaacataaattattgaaaaaaagggatttgctctctgagtgcacgcacagtaaaaagagtgcggggcatattacacggattccaaattcgattggggaattccaaatccgctgtaattaaaaagagattgcgtgcggttgtttctgcatgacaggagagcctcttcgcagaaaggaaataaaactgatgatcaataattttctttgaaatacggactttccggcaggtatggatgtttctgccggaatgggaattgatggggttacccggatggaatcatgaagacggaagatcccggtcattggggaagcttattttcagaagttcctttctttcaaaatttaaccttgactccggatttggaattcgttatttttagacagtttaaaaaaacttaaactgtttattcgatttcatgatttcagccattcttctttgttacaatcagaaacgttttatcaaggaacagttccgggctattttaaaacaggattatccaggagaatgggaaataattatttcggacgatttttctcaggacggttcttttgaatgcctggaagaaatggtggaaaaagagggagaaggacggcgtattattctccaccgtaacgaaagcaaccggggaattgcagggaatttgcaatgtgccgttcatttgtcccggggggaatggattatcaagtttgacggcgatgacatcgcccgggaagacaggatttcctcgttggcgtctctggcggaacaatatcccggtcatctggtttactgccattcttataatgaaatcgatgaagatggacaacccgcctatggacgcatgctgccagactcagattccgtcgtcgtcaaaccttacagggaatgtatttttgacatttcccatgtttacagctgttttggcggaaatgccatgtaccacaggtctttgttcagcgacttcgagtatttgccttcaggtcccggcatttcggacgatatgatgctgtccatgcgcgcctatttgaaaaaatcaggcatggtcgcatccggcaaacggtgttcgtactatcggagacacaacagcaatatctgcaattttaagagcgggaaccccaggacaaccctgatcaagagatcggaattccagataacaacctggataatgatcatgaaagaggtatacggaaagcataagtccggggaaataacataccaggccgccgaccgcctgatgaggctgattcaggcggaacagagaaggctcctgctcttcccctatgcttcattcgataacagccttcttaccaaactcaaatggttttggaacatcctgcaatgcaggccggggctttggctggtcagcattccaagattgctcccgttttgcctgctgcaaaggtatttgaacattaaagaccggataaaaagtcttcctttttttcactaacagcagggatcctgcataaaaaacaggaagaaaaataaacgtactgataccctgcctccctcccttccatcatcgggaaaacaaaaaagccgttccgccggacaggcctgcgcggaacggccgggaaaagaaaaccttgacaaggttaatacctgtaaaagtccggcttgtaaggaccttccaccggaacgccgatgtagtccgcctgctccggacgcaggacagtcagcttgcaccctatcttggcgaggtgcagccgcgccacttcctcatccagcaccttgggcagcacttccacgcccacggaacggtctttacgggtattccacaattccagctgggctagcacctggttggcgaagctgttggacatcacgaagctgggatggcccgtagcgcagcccaggttgaccagcctgccttccgccagcaggtacaggctgttgccggacgggaacgtgtagcggtccacctggggtttgatgttaagatgcctgatgccgggatacgtctggagcttgtgtacctggatttcattgtcgaaatggccgatgttgcagacaatagcctggtccttcatcttttccatgtgttcgatgcggatgatgttgcagtttcccgtggtggtcacgtaaatatccgcccagcccagcgtgtcttccaccgtcagcacgcggtagccttccatggctgcctgaagggcgcagatggggtctatttccgtcacgaccacctgggctcccatgccgcgcagggactgggcgcagcccttgcccacgtccccgtagccgcagacgacggccactttgccggcaaccatcacgtccgtggcgcgcttgatgccgtccacaagggactcacggcagccgtacaggttgtcaaacttggacttggttacggaatcgtttacgttgatggccggaatcagcagacggccggctgcctgcatctggtacaggcggtgcacgccggtggtcgtttcctcggaaacgcctttcagctcgggaagccagcgatgaaaaatacccggagtcgcctcggcaatttttttcaacagagccttgatgacttcctcttcttccgattccgacggggtatccacccagtcggagccttcttccatttcatacccgcggtggataagcagggtggcgtctccgccgtcgtccacaatcagctgcggccccagcccgtccggaaagttcatggccttccacgtacagtcccagtattcccgcagcgtttcccccttccaggcgaaaacgggggtgccggatttggcgatggcggcggcggcgtggtcctgggtggagaaaatgttgcagctcgcccagcggacggaagcgcccagagccgtcagcgtttctatcagcacggccgtctgcaccgtcatgtgcagggagcccatgatgcgcacgccctccaggggtctggcggcagcgtacttttcgcgcacggccatcaggccgggcatctcatgctccgcaatatccagttccttgcgtccgaaatccgccaggccgatatcgcgcaccttgtattgttccgtttctgaaaacatgtctgtaagcgttgtcgtaggattaatgaagaagttgtttcaggaaggccaggcgcgtttcgtccagctgttcccagggcagttccggattagtgaaatgcccgtagtgcgtcgtcttccggtaaataggctgaagcagattcagctgtttcaccatatccgcgggcttgaaggaaaagatgttttccagcgcattttcaatggatatttcctccactttcccggtaccgaacgtatccacccggatggaaaccggagcggggtagccaatggcgtaagccacctgcaattcacatttgtccgccagtccggcagccacaatgtgcttggcaacccagcggcacatatacgcggcggaacggtccaccttggacgggtctttcccggaaaaggctccgccgccgtggcgccccatgccgccgtatgtgtccacaataattttgcggcccgtcaggccggaatccccgtggggaccgcccacgacgaatttcccggtggggttgatgaaatattccgtcctctcatccagaagctccgcaggaagcacatttttaatgagtttgacgcaatatgagtaaatcgtgtcatggtccacgtcttccgtgtgctgggtggaaataactacgttttcaatatgcgcgggacgcccgtcttcgtcataggccacagccacctgggacttgcagtccgggcgcagccagtccacatgcccgcgcttgcgcctcctggccagctcaatgagcagtttatgcgcaaacacgatgggggccggaagcagctccggcgtctcattcgttgcgaagccgaacataatgccctggtctccggcgccctgctccgcatggcccttgccctccgcctcccgggcgtccactccctgggcaatatccggggactgttccgtgagcaaattcgtgaaaaagacggtatccgcatggaaaacgtcgtcgtcctgcctgttgcagtacccgatctcccgaatggcctggcgggcgattttttccggatcgatcaccgctttggtcgtcagctctccggcaatgatgaccatattgctcttcaccaacgtttcacatgcaacgcggctagttttgtcttgagccaggcaggcgtctaaaatagagtcggaaatgtagtcggccaccttgtccggatggccttctccaacggattccgacgtaaagatgtgaggggtgtttctactcatatcgataaatctcgatgtgttgatatattattccgctatgaagtcaaccctaaaaacgctcaaactcctggcagatcccacccgcctgcgcatcatcaacgttctgaatgaagaatccctgagcgtcgcggaacttcaggaaattctcggcatggggcaaagccgcatttccacccagctggcccagctccggcaggaaggggtggtggaggacgcccgttccggcaaaaacgtcttttacactctttccctggcaggtgatctgcacaatgtagccctgaaagcctgcgaggaattgccggaggcggaaacggacaaaaaagcccttcaggttatcctggacaagcgcaaaaaccgcacccaggcctattttgacgaagtagtgtgccgtctgggcaagaactacgcgcccggccgttcctggaaagcgctggccggtgctctgctccgcattctgaactatgacgtagtggcggacctgggagccggggaaggtttcgtttcccagctcatctcccccagcgccaaacaggtgatcgccgtagacaactcccccagcatggtggagctggggcaggagctggcgcgcaaacacgggctggacaatctggaataccgcctgggcgatatcgaagcgccgcccattaaacccggcacggtggatctggccctgctcagccaggccctgcaccatgcgcaaaagccgtccagagcgctggaagctgcgtgggatatcctgaaatccggcggttgcctggtggtgctggatctgctccagcatggacaggaggaagcccgtgaactttacgcggaccgctggctgggcttcacgcccgccgccctggaaagcatgctgaaggaagcgggattccggaacatccacacggatattgtggacagggagccggacccgccccatttccagactctgatggccgccgcctggaaaccgtgacgtacagccgtcttaatccattttccttccggaatagccggagcggactttccgacatgcctccacaagattcctcacggtaccggcatgccatccatgaaaagccgctacatcccggaaaccctgtcttccggaggcctttccgccggaaaggggcggcttccggattgcagggcttcccgcattccccggacaatatccatcatctgtcctgcagacagctcctccttaccctcaatttcctcatccaccagcgctttcatttcctccagcagatgctccggctccagacggtaagtaagcagcacccggaacagctctcttccggcagcctgcagagggaccgcaggaaaatccgcgacactattcaaatctttttcttcaaaggaattcaggagctttgcataccgcaggaaagcgcacttgaattcccctgggcatccgcccatatccactgaagccaaataccggcggaaggaaatctccgccgccagatgcacggcctcatcccccgtggattccgccagccacgtttccttttgcttcagatgcacaagcaggaggaccttcctcatggcttccctctgtctgcccttggggccacttttcagtttgaccaggtccaaatccagatccgcggcatcggggctcgctacatcctgggcgagagacacacccagggaggccgccattatgacaaacggcagccacctcctcatgcattcccgaatatggaccattgcggtcagccattacatgaaaaacgccggaaaatcaacccaaatccagcgcctccggcatgaagaaaatccatgccggaatgttgtgcccgcccagaggaacacccggaactgcagatcattccgacataagctccatccctccgttttccaagcgttccgggcgggaaaagaaggaaaaaacgatgtccgcacccgtacccggctgctggccgggaaggacggcttcatgccagccggagagattgacggacacacgggcatatgagaaaaaaccgtctatgctattcgcagtagtgattttcctttccgtggtcgtgctcggtgtcattgccgcgctgcgtttcaccaaaggcatcattcccctgcgcacctacgaatcccgggaactgcccggcttccccggcccggcgggattaatccaccgcctggacggtgcggaaaaacgccagcggaaactggagaaagcccggtttcccggagtggatgaaaacggattcatcagccttcctccggcatgggaaggcaaggtgaccgcaggccggctggcctgcgtagcccatacctgggccatgagcagcctggtccgggaagacccggaggcggcaaaagcccgcaaaaccgcctctgcgcgcgccacgatgattccttttttcacagctcttatcctgctgggaatgctgacggccggactgttgaaattccagatcgcgctggccatcgggctggcctgctgggcctttttcactttctccgcccttccctcccagttccgcgaatggaaagcggcggaaatagccaaatcagggctaaaggaagccgggctgtggcccgtgctgccttcggacgccatggctgtggaacaatgcctgaaagcgttgtcatggtgccacgtggcaggcttccgacgcattctgcccagatagcggtttccccggcgatgaagcgcatttttccggtcaaaccggcctttgggagaaaaaaatcttgaaacggggatgcgtgtaacccactctttcatcgtcgtcaacttttccttaccgtttccatctctccatgaatgagtccgcaaaccccatcctcaaatatttttcggaattcaagatcctgaaaaccgtatccaaggatttctggcttaccaacgtcgtccagttcttcgacggaatggcctatttttccatgattacggtattcgtcctctacctgacagactattgcagcttcaacgatgcggacgccgccctctgggtaggcctgtacacccttttcatctccgccttcgtcttcgcggtgggttccatctgcgacatcatcggcatacggcgcacttacctgatcggcttcatcatcctcattgccgggcgccttatcatgggcttcggtccggacctcagcccaaccgtggactccggaaggctggccgtcatggcgggcattctgattatgtccttcggcacggcgttcatgtcccccgtcatccaaacttccatccggcgcttcactccgctgaaagcgcgttccacgggcttcaatatctactacctgctgatgaacatttccgccgtcatcgcgaacgtgttcctgattgaatttttccgcaagcacttcggcgccgtggacggcggatactggattatcaacttcggaacgctgatggtgctgctgggctgcatcaccacccgttttattaatgaagacaactacgcggaacccagcgaacgggaggcgaacatcaatgcccccctccgcagacctctccagctcttcatggaggtgtggaaggaatccgccttccgcaaacttatcctcttccttgtgctgaccatgggcgtgcgcatcgttttcacgctgcaattcctggtgatgcccaaatactacgtgcgtacgctatatgacgactttgccataggctccatcaatgccgtcaacccggccatcatcgtctccggcctcatcctgctcattccggtgctgggccgcttctctaccgttggtctcatgattgcgggcatgtccatctccgctttctctctcgttttcatggccattcccattgaatggtactacctggtgcccggcattgaaacgcgctctcaggcgtatctggtagccattgtggcgcagatcctggtattcgcattcggggaactgctcttctccccccgcttctccgaatatgtggcgcgggtagctccgaaagacaaagtggcctcctacatgtctctggcggcgcttcccatgttcatcgccaaacccatcaatggcatcatcggcggcctgctcgtcgcctacctctgctatgacggcatctgcgccaagatggataccgggcacatcggcttctgggactccccggaattcatgtggaccatttacctggccatggccgtaatcagccccatcgccattatcatgacccgcaggaccatcacctcggaccatcccgaggaagacgcggcatcgccacccatcagcgccattgaagcggaaacggatcccgccctgacggcggaagaatttacggaagccaactcctga

SEQ ID NO: 10 - DNA, 8195 bp, unidentified
  source 1..8195: mol_type = unassigned DNA
ttacttttcattcctgtcaatctttaaatctttgtaatattgcattggagtaacaccatattctttcttaaatgctctaaaaaaatgattataccctccaaatccaccaagctcatatacctcatgaatacttttcccctgctctatataatggcggcataaatcaagtttgctctttacaatgtatgaatgaggggtctcacctgtcaattttttaaactctcttactatatgataacggcttatataaaattcattttccaagcgctccaacgagatatcttctgtcaaatgttctctgatataaataaaaatatcatccattacaacgtgttttttcttcttcgtcttgatctgtacatcatcctgaacagatgagcgaagtgcaagtacaagaatcatagttaataggcttttctcgtataatgagtgggcaaatttaggcggctcattattcatcgaatagagcttttttgatatattctttataagcatagccaattcagtctcagaatgaacaatcttaacttgatacggaacaaaatcaaacgcttcatcaagtcttgtttcttcatctgacaatttccttaaaagttctccacctatataaagaacataaacttcaagaggatacttatttttacgatattcaagctttactttattacctggcttaataaatatcaaatcctccatagtacatacaatattatcgtcctcctggtgcatataccctatcccaccagctataaatacaattgtatagctctccttttgcccaaagcttcgctgggcactatccaatattttcaaatattccattttgtagccttgctttttcatatgtctattttgtacactttcctattatattttttgttcatttcgtcaaaatatacaatatatcaatttttcgtagtttgcaagcaatatttgtatatggatatcagcataaccccaatataataagattgtagctactaaaacaatataaatgtttggaggtaaattatcatgaaagaaacaagacctttttccatgaaggacaaaattggttacactcttggcgatttgggatgttgctgtactgagcagttccgtgccatgtatcttgctattttttatacactggtatttaaaagttaatccagtacacgtaggaatccttatgcttgttacaaagttttgggatgctataaatgaccctttaattggtgcacttgttgatagccacaaaaacaaaggaaaaggaaaatttattccttggattaaattctttgcttttccaactgcagtactctgtatattaggatttgttaacgtaagcaatttcgcttatggtgcacgtattgcttatatgttcattacatatattgtttacgaaattatgtacacatgtgtcaacgttccatttggtagtctttcaagtgtaatgactgatgatgttaaccaacgtactgacctttctcgtttcagaagtcttggcggtacaatttttatgacagttatcgttattgttggaccattattcttatataaagataaccagccagtacctagccatttccttattatgtcagcaatctgtgcagttattggattaatctgtcttatgtttacatctcattggtgtaaagagcgtattattacagagccagttgttgagaaaaaagaaaagtttaactacttccaggtaattaaagatattactaaaaacaaagcattactcggagttatgttatcaagctttatcggtattgttggagcaggtatggttaacggattaaatacttatttattccgcgattattttggaaatgttgccatcatggcattttcaggtatgttaagtgtactctggtcacttattgcattcgtaggtacaaaatttgttgctaataaatttggaaagaaagaatggattatgtacagtgcaactttctcagttgttgtttatgctattttattcttcttcccacttgaaaatcctatgctctttattatcatcaacggaatctgctatcttggagtaagtggtttccaagtattagtttgggcacttgtaaatgatgcaattgattatcaagaacttcagacaggaaaacgtaatgaaggaattgtatattcggcatatacattcttccgtaaacttgctaatgctgtatcaggaagtatgagtagttttgcacttgcaattgctggattccaggttaatgaagctgtccagaatgaagcattctcaggacatctttggaaaacatatacaggtttatatgttgtaggatatttattagctgttctggtattaaaatttatctaccctcttacaaaagagaaaacagctgaaatgttacaggatttagctgacaagcgaaatgctacaactgcagaataaaattagaaatggaggtattttaaattgacaaaacaagtagaaatcacaaaccgtgatggacacatcttacgcggaatagttaacattccagaagatggcacaagatttcctgctattgtaaatgtacatggctttacagggaataaaagcggttacaaaagtatttatacgcacacagccagattattagctgaacatggatttgccagtgtccgttttgatttatacggaaatggtgaaagtgatggtgaattcgaggacatgacctttacaggtatcctacacgatatcgaggatattataaactggactaaaacacaagattttgccaatccagataagattatcttatctggtcagagtatgggaggatacgcagctgctactgccgctcctattgttaatccttatgctctcatgcttatgtgtccaggtgctggaatgtggtttggatgtaaggatcgtgctgaagccatggaagctaaggggatcaccaaggccgatattgaaggactcactttcccaacatcttttaattatgatttatttaattatgagccattctcgtcagcagaaggatacaacggaccagtcctccttataagaggaactgcagatgatttggtagatgatgcaacatgccataaatatgagtcactttacaatggaaaatgcaattataaaacaattgaaggcgctaaccacaattttgccagtgcttttgcaagagcagaattagacaaattaatgttagagtttttaacaccacttaaatagtatattcaatttgaaaggaagtatgaacaatgaaattattagagcctataaaagttggaaatattgagtttaaaaaccgtattatgttcccaccacttacaacaggatatgaggaaaaagatggttcaattggagaacaaagttttcgtttttacgagcgtctcgcaaaaggcggtgtcggatatatagtaattggagatgttgcaccacttccaacattctctcctacaccaaagctttattcacctgagcaggttcaaagcttcaaaaaacttgctgacgcatgtcatgaaaatggtgcaaagcttggaattcagttattccatcctgactacaatgttaaagctttaaacgatatgtttcatcagggcaaaatgcaggaagcaagagctaaacttcaccatgatatgcagcactttgtaaatgaagtaactgcagaagaacttgatgaaataataaagcatatggaaaactgtgctatcttagcacacgaagctggtgttgattgtattgaagtacatggagaccgtcttgttggttctctctgctctcctattttaaatcatagaactgatgaatatggcggtgacctggctaatcgtacacgttttgcattaacactcgtaaaaagattaaaaacaattgtacctgacatggttatcgactacaagcttcctatagttactcctcttggagaaaatagttttagaggaaaaggtggtcttccacttgatgaagcttgcatttttgctaaagaattagaagcttgcggtgttgacacattacatgttgcacaggctaaccatactggaaatatgggtgatacaatccctgccatgggaacacagccatacggatttatggtttcttattctaaaaaaatcaaagagcttgtatctattcctgtatctgtagtaggccgtatcgttacaccagaagctgctgaagcagttattacaaatggttctgctgatattattggattaggtcgttctcttctcacagaccctgactttgcaaacaaatgcgcagatggacattgctgtaatgtcagaacatgtatgatgtgtaataaaggatgtacagataatattcagaatcgtgctttcttaagttgtgtacttaatgctgaaaatggttacgaaggatctcgtcagattactcctgcagcatcaacaaagaatatagcaattattggtgctggtattgctggacttgaagctgcacgtgtttccgcattaagaggacatcatgtaactatatttgagaaatcacttcagattggtggtcagttacttattgctagtgtacctccaagaaaagaagaaatgatgagaagcattaattattatacaaatgtacttcctgaattggatgttactttcaggcttggtcaggaattcacatcacaggattataattcattcgatgaagtaattgtggcaacaggagcaaacaatgcaataatccctgttcctggcaaagatcttccaactgtagcaagtgcatgggatgtacttgccaagaaagaaatcgtattcggtaatgtttctgtaatcggtggtggtcttgtaggtgttgaaaccgctgaatatctggcttcacgaggatgtaaggttacaattattgaaatgatggatcagattgcaaaagaagaaagtaacactattttacctactctaatgagggaattagagcattataatgttcaaatagtaacatctgcaaaattatcagaaatcaaagatgattctgtagttgttgaaaaaacaatagacgacaatacatcaacagaagaaattgcttcagactttgttgtaatggctgttggtgcaagaaagaaccttccagagctttctgattgtcctcttccacttcactatattggtgattgtgctggagaacgtccaagtaatattgatcatgctattaaatcagcatatgatgtagcatgtgaaatataaattattaattaccctattaccacaaaggggctgccgcactaagaatgatgtgtggcagctttttttagattgtgttgaaaaattttgattaatataaaaatattatataacaataatgaggcgtacaatagttgtgacagtaaataatatgaaatttgacttgctattttgtgttggtgtatgcggtaaaatagtgtataattattaacaagatatgaatgtgaaatgcatttatattattaggaggaaaatgatatgaagtggggaattctggctacaggtaatattgcaagaaaatttgcatcaactataaatcagatgagtaaggaaaatgaacagcttgcagcagtaggctcacggcacatggatagtgcaaaagcttttgccagggagcatgacattccacgatattatgattcttatgaagcattggtaaatgatcctgatgttgaggctgtttatgtagcaacaccgaatagtttgcattatgagaattgcagactttgtcttgagcatggtaagcatgtactttgtgaaaaaccatttacaataaatgagaaacaggcacaggaactgtacaggctggcaaaggataagcatctttttattatggagggattatggatatggtttctgccattgtataatcgtctgcgtaatatcctgcttaagggaacaataggagaaattaaacatatttcctgtcagtatggatttgttgcaacgggtgccagaaaagagcgtaaatttaactctgcacttggtggaggtgctctgttggatataggaatttacaatctgggatttttgcgtattgttacagggtgtgatccgcagaatgtagaaactacaaaagtacatattaatgagaatggaacagatgattacagttgtctcaaactgacatataatgatggatgtattgcagaatcagtccagacaatagggcaggagttaaaacgtaatgccagaattgagggaacaaagggaagtatatttttaccggatttccaacacgcaaagaccttgatacttgaggtggatggtaaagaacctgaaacaatcgagtacccagttgatataaatggatttgaatatgagattcgtgaagcaggcagatgcatagcatcaggaaacagcgccagtgctatttatacaccggaagatagtattgcacttacaaggctgatgtatgatatccgtatgagctggaatatgatatttgatggtgagatacaggcataaaccgacaaatagcttatttcagataaattgacaatgcaaaataataaagaagaatatgggggatatgtgtattctatgtgtcattgcgccaataatcaaaaagattacaggatatgacaaaaatattaataaatgagtaaatgatgtgagtatgttatactctagtttgtaaaaatagaaaaattggagttgtgtgcccagacaaagggcgagtagtctaacaggtggaatacctgtctggtaaggtttaaccaacagccagtagcataagcagatgccgttattcagacaagtgaagatgaaatgaaaatgttttgtgatagattaaacaaaaagtaaaaattatatcaaatgataagaatttacataacttaataacttatggtcttgattgcgtatgcttaaatactgcttgtaaaagatgaggttgtaggtggtgataaacttacctatgatgagtatcttgagattatgaagaattccggaaaagagagcaggcattattttgaaatggtatatagaaactgtggacttgaatttaaaggccgcatagagaagaaaaatcatcaaaatatatgttttgagagaatctatgtatccggaatgtacatggatggtgtttgctttgacgataaagaagaacatctcattgcagctaatggcgaccatatattgaatctttctgtggtttatcatctgttactggttcaataaggaaatctaaaaccttacgctgttcacatctatattgtaaaatccccaatatcagtaataatttttttaaacatttaaaatcataactcaaatattgtattataactttatttgagttataatacataaaataagttatgaatggaggcatatatatggaatatctccaaaaagttctaggattgaaactgacctatataaatgatgacattaaacatatacccaattttattggaacaagatatgttctgcgtaatgtactattggatagacaaaaagctgtttttatatatcctaaaacggaactagagcagattgaaacgttaaaaaaacatatttcaaagataaaaagcatagtgaatttacctgttgttatgattctggacgaaatcacatatcgtcagaaggaatatttgcttcgggagaagattccatttgttgtaaataataaacagatatatctgccttttatggcgttatatttacaggaacgttgcaatgcagaaacatttcctaatgaggaaatacttccttcagctcaggttctgttgttgtactttatatataatgggactgttgaaataacaacgagtcaggcatcaaaagaacttggactcacgcctacatctatttcaagggcttctcgtcagcttgaaaaattaggattaatacagaccatgaaaacaggtaagcagaaaattatacattctgatagctcacccaaagagttatttgagagaactcagcagaaattacttaatccagtaaaaaaaactgtatatatacctaaaaattgtgtaacttctgaattgttagaaagcggatatttcgcattagctcattatacaatgataaatgttccacaaatcaaatgttttgcaatagatagtatttcgcgttggaaggatgttatgacaaataatttacttgattcagaaaatcaaatggcagttgaaatgtggagatataatcctcatttattatcaaaagaagataaggtagatgaactttctctagcattgtcattgagagatgatgcagatgagcgggttgaagcagcagtagatgagatgttggaaaaattatggggaaaaatataa

SEQ ID NO: 11 - DNA, 9377 bp, unidentified
  source 1..9377: mol_type = unassigned DNA
ctatttcaacagtgccgacgaaatcaccatccgctgtacttcggaagtaccttcgtaaatctcggtgatcttggcatcgcgcatcatgcgctcaacggggtattcgcgcgtgtagccgtatccgccgtggaattgcacggccttggtcgtcacttccattgcggtttccgctgcaaagagcttggcccgggcggcatcgaccgagaacgggagcttctggtctttcttgaaggctgcggcacgtaccagcaggcgggcagcttcgattttggtatccaggtctgccagttggaactgggtgttctggaactgtccgatcgtccgtccgaactgtttgcgctccttgacgtatttcacggtttcgtccatcgccccctgtgcgatgccgagggcttgcgaagcgataccgacacggccgccatcgagggtcttcatagcgatgttgaagcccttgccgaccttgccgagcagattctccttgggaacgatgcagttctcgaaaatcaactcgcaggtcgccgaaccgcggatacccatcttcttctctttcttgccgatcgagaaaccggggaagtcgcgctcgacgatgaatgctgagataccgcgcgtaccctgcgacttgtcggtcatcgccatcacgatataaacgtgtgcgtaagcggcgttggtgatgaagattttgttgccgttcaggatatagtggtcgcctgcatcgactgccgtggtctgctgtgctgcagcatccgtaccggcgttgggctccgtaaggccgaaagcgccgagccattcgcccgagcagagcttgggcaggtatttcattttctgttcttcggtaccgtgctcataaatcggagcggcgcagagcgacgtgtgtgccgatacgaccacgcccgtagtggcgcatacgcgcgacagctcttcgacggccatcgaataaaggatgttgttgccgcctgcaccgccgtagttgacggggaagggaataccgaagattcccagttttgccattttctctacggtttccacagggaaacgctcctcttcgtcgatttcggcagccagaggtttcacctcgttttcggcaaattcgcggatcatttgccggaacagctgctcggttttggtcaattcgaaattcattttataagtatggttttttaatgattttaaacagtcataccgccatctacgctcaaaacggcaccattgacgtaggccgcttcgtcggatgcgaggtagagataggcggcggcgatctcctcgggacgacccaggcgacctacgggaactttggcccgcatgccgtcgagtacattctcaggcatcttggcaaccatttcggtttcgatgaagcccggggctacggcattgaccgtgatacccttacgtcccagttcgcgggccatcgttttggtcataccgatcaggccggctttcgtggccacgtagttggtctggccgaagttgccgtaaagccctactaccgacgaggcattgacgatgcgtccgtagccggcttcgagcatgtagttcaacacggccttgcagcagtagaacgtgcccgaaagattgacgtcgatcacgttctgccactgttcgacggtcattttcttgagcgtgctgtcgttggtgatgccggcattgttgatcaggatgtcgatcttgccgaacttgtcggcgacgcgcttggccgcagcggttaccgcctcgaaatcgctcgtatcgaccttgtcgaaggtgatggcgagcccttcggctgcggcttttttctccatttccttaccgcgggcttcgttacgtgcccatacgactacctgtgcgccttcgcgtgcgaaacgcagtgccgttgcttcgccgataccggccgtgccgcccgtgacgatggcgactctgttctcaagtcttttcatggttatctctttttagatgaattctttgttgtgtttgagtttggcggtgcccgtgatgcactctttgccggcagcatcgagcagcaggcatttgatcgtaccgatgtgtttttcggtgtttacgtcgattacttcgaattcggccgtatatttctccccggcgaagacgggtgcacggaacgacatctcctgcgagagatagatggtgccctgtcccgggaagagcattccgaagaccttcgagaatacggaggccgaaaggaatccgtgcacgatgggacggccgaacggggttttggctgcgaattccggatcgaggtggatcgggtttttgtcgcccgtgatttcggcgaaagcgatcacgccttcctgcgtataggtcacttcgtgacggtatttatctcctgttttgatcatggcgggcctattttttcatgggtttaagatccttggacacgatcaggtgcgcttcggtagcggcctgaacctgttcgacggtgaattcgggattgatttccgtcagcacgatgccttccggggtaatctccatgacgcccatttcggttacgatcatgttcacggagcctttggccgtcagcggcagcgtacatttcttgaggattttgggtgcgcctttggccgtgtgttccatggccaggatcaccttgtcggcacccgtgagcaggtccatcgcaccgcccatgccgggggctttcttgcccgggatgatccagttggccaggtcgcctttttcatcgacctgcaaggctcccagtaccgaagcgttcacatgaccgccgcggatgatgccgaacgaggtggcgctgtcgaagcacgaggcgccctcgagggccgtgacgaatccgccgccggcattgataaattcggggtcttcctcgcccggtgcgggggtcgggcccataccgagcaggccgttttcgctctgcaggaagatttgaacgccttccggcaggtaatcggggacggccgtcggcagtccgataccgaggttcaccacgtcgccgtctttgagttccatcgccacgcgtttggcgatgatttctctgatctgttccttttccatagatttatgtcgtttttgtctgttcgtcgtactgtcttgaaacggggcggttctggaatccgggaccgtttcctatttgcggtgcattctgcgggccatctcctgggcgatgaacgacgccacgtcgtcggcgtaggtgttcatgccgaagccggcgtcatagcccagctctttggccagttcgtgcgagatgcgcgggccgccgcacgccagaatcactttgtcgcgcagcccttcggcttcgagcatttcgaccagctccgtgaggttcttgatatgaatgtccttctgggtcaccgtctgcgaaaccagcagggcgtcggccttgagttcgatcgctttggcgatgaactcttcgttggttacctggctgcccatgttgagggcttcgaacatctcgtagcgctccagtccgtagtgacctgcgaagcctttcatgttcataatggcgtcgatacctaccgtatgggcgtccgtgccggtgctggcgccgatcaccacgatcgggcggccgatctgctcgcggatgaagctgtccgtttcggccatgtcccatttggtcgattcgactttcgggacatggatattcgaataatcgaccgtatgggtacagcttccgtagcagttgaagaacgtgtaaccggccgtcagctcccggtggaataccacctgcgggttctcgaagcccatctttttcatcaactgtttggccgcttcgatggcttcgtcgccggcgggcacgggcagtgtgaaactcaactgcgttttgccgtcgttcatcgtgtcgccgtagggctttatctttttcaggtcgagggtctggtcgaaatccctgccttcggttgaatataatcctccactcatagaatcaatatgctaatatagttaaaataaggcgtttggtcgtgcttgcagcatcggaatatcattttttcgctgcggcgcgactgccgtttttcataatctccacgaaggggttgtagtagttgcggcccttgctgctcacgccctccagacccttgccgccgttcatggggcgtttgatgtcggcgaagattcccttctcgagcgccgagaagagtccctctttttcgaggcgttcgagaagtgcggtagctttgtccaaaacctccttggcacgtttgcggatcagtccgccttccttgaactccacttcgtcgccgatgttcttcatgttgttgaagatgtagcgggcgttctcgatggaaaggtagcggtccgacatgaacggggtgtggatggcttcggtcggcatacctaacaactggatgccctgcgaagtccagatgcccaccatgttgaacagtgcgtcctggatatgtccccggaagatgttgccggtcatgaacttcgtcggcggcatgtatttcagcggagccttggggaagatctcgcgggtcatctgcgcctgcgccagctcgtagaggaagccgttttcgagcatcggatccatctcgaaggcgtgtcccagacccatttgctcctcgggcaggccggccagcagggccagttgttcgttgatcaggtcggaagccagcaccgtgtgggcttcctcgaccgcgtcggccgtggtgaggtagttgtcctcgcccgtgttgatgattacgccggcgaagccgttgattacgcgcgacatatattgatcgaccagcgtgcgctgcatgttgatgtcgcggaacagaatgccgtacagggcgtcgttgagcatcacatccagaccttcgagtgcacccattacggcgatctcgggcatgcagagtcccgagcagtagttgcaaaggcggatgtagcggccgacctcttcgcctacttcgtccagagccttgcgcatgatccggaagttctcctgcgtggcgaacgtgccgccgaatccctcggtcgtcgcgccgtagggcacgtagtcgagcagactttggcccgtagtgcggattacggcgatgatgtcggcgccctgtcgggctgcggcctgcgcctgtacgacatcttcgtagatgttacccgtcgctacgattacgtagaggtaggggcgcggcccttcgccgatggtggcgatgtagttttctcgacgctggcggttggctgcgattttggcgatgctggcgtcgatatacggtttcagcgccgcttcgcgctcggctgccgtacatacggccgagcgggtgatgtcgagtttgccggcagcgatctcttcggcgatttgctggggtgtgagtcccgtttcgacgatcgcgttgccgaggaagaacagggcgccttcgcccagtacgtttttctcccgcagctcttccaccaccacgttcggcagcggtaccgcgttggcatccacgccgtcgatgccgatcagacggcacagcgtccgctcgacggctaccgtcgtataaccttccacaaaatcctgcaccccgttggcgatcttgcgcgctacgtcccgggcgtgttccacctggttaaagtctattcctaatttgcttttcatatcgttcatgtaggctgtgccgtacggctgccgtcattggttgtttttgagttcttcgttgcgttcgattcgccggaggatttccgggtcgatgcccagaatacgggcgatccggatcgcttcgtgcggaacttcgtccgtcgtgacctcctcgagcgagtagtctatgaaatcgttgatgtttttcagcgtgatcctctcctccgcgttcgtttccgagaagccttttaccttctgcttgcggtacggagccgcgatgccgttgtagtgggtggttacgagcgaagggacttcgtagtcggccagaaattcgaggacgccgttcacgatcgcccttccttcgaccggattggtcgtgcgggccggttcgtcgatgagagccagcacccgcctgcctgcccggacgcttttggccagttcgtccatccgcatcatctcggccgcgaacgacgagagtccgctgagctggtcctgtccgtcgccgatggagcagtgtacttcgtccacaagggccatttccgccctttcggccgcaatgtaaaatccgaattgcagcatgtactgggccagctcgacgctgtgcagcaacacggttttgcccgacatgttggcgccggtgattaccgtaggtcccgtcgtcaggcggatgttcacgggctggaatcgcttcccggccgcttcgagcgaaatccgcagctcagggttgaacaagcctcggaaggaggccgtgtcctgcgttatcgcgggacgggtaaggccccagtcgcgggcctgcatcgccttggcgatcaccacatcgagccatcccatcaggtcgagtgcctgttgcaacgctttgtggtatttccgcaattcgacggagagcctctcccgaatgcagtcttcgatctccacgctgcggaaatagagctcctgcacttgagactcgtcggctccggcctgtttgcgggccttgatctgtttgcgcagggtcgtcagctcctccgagtaggcgtcatagacgaagaaatgggggagccggttgccttccggatcgagcagatcgacgaccccgttcagctcgggaagttcggcaagacgcccttgcgatgccagcggtcgaagctcttccgccagcagcgcgaaaaacttcaattcgaacagctcgatgtcgtcgaatacgcagttgccgcccgtgcgttcgatcgttgagcggatgtcgcgcaacagggccagtttgcggcgaatcgtttcggtgcggtcgcgtccctcttcggtttcgagcaggcgcagcaccgaggtgatacggtcgtgttccgccgtgatcgccgactcctcgccgagccatgtcatttcatggagcatacgtcgcccgacggaggaacagatctccattccttcgacgacgcagcgcagtccgctggtatgttgtatggcctctttgagtcgcattcgctttctggttattcgatgcaattttacacgggttcgcgtatttatttcacggccttctgccgtgtcagagcgtttgaccttcctctgactcccctcctcggaggggactttaagatcctcgattctgttcgtgtgagccgtattcgtttctattcgggcattttctttacgtcgtaaaccggtatctgcaacgcctcctgcatcgcttcgcacaactgtcgggagtcgagcaccagccccgacggagccgtcggattgaccgtgacggccagcagccggctgcggtgtaccaccctgatccggtgcccccggcgcaggaaagcgtaaaacgcttcgggcgaggcgaacacccgcgtaaagtcgcggatgatcaactccacttcccgttgttgcgttcgcagcagttggaacagcttgtccgtgacgatgccggtggcgtaaatccgccggccgtgccggaacaggttttctccgctccgttcgagcatcagcaccgagggtaattcgaggtcgatcggttcgccgccgtcgctgacggcccacaccccctgcgtcaggggggcgagccgggtacgcagcgccttttcgatctcttcgatcccgatcagttcgtaaacgtatttcgtcttgcggaccagttcgggaatatttcccgcgacggcagctcccgtggccaggatcatcgcttcggtgaccgctggcgaagccaggctcaaccgcgacagggcgccgtccacgatcgtcgtgcctacgccccgggatttgagcaggtcgatcagggctttcaggcccgccgtgtccgaaggtccggagagcagcaatttgccgctcatcttcgcgcgggccgttatcagccgcccgagcgccgtccgttccaggctcacgtcgaggacctcggccgcgagccgtttttcccggtagtgtttctccgaggtgacgaagatcattccctcgggaatctcgatctcgggtttcgctgtctggcacacctgatcccggctctcgccgtcgattccgaccgaagtcagggcgaaacggtccgcccgaccaccgagttgtcccagaatgtagttcagacattcggttttacccgtgttcttctccaggccgacgatggccaggctgccgaaatccgatatgttcgttacgaatcccaatccggtgcgggctggtcttgcagcgttacgttctaatggttgtggttacgggtcttgcggctcaattcggacggctcgagcgaaagacgtccgccgctcaacaactcggccacgccttccttccgacgtgctttctcgcactcttcgcagtggcattcgtccttgtagtcggtcggttccgtataggtcgtgatcacaccttcgtagttgcggagtaccacgcggttcggagcctgcgagatgacatagttcggcatgacaggaatcttgccaccaccgcccggagcgtccacgacgaatgtcggaacggcgtaacccgaggtgtgtccccggaggttctcgatgatttcgatgcctttcgataccggagtgcggaagtgtccgatgcccagcgacaggtcgcagatataaatatagtagggacgcacacgcatcttcaccagttcgtgcacgagctttttcatgatgtgcgtgcagtcgttcacaccgcgcagcaacaccgactggttgcccaggggaataccggcgtcggccagacgtgcgcaggcctgcttcgattcgggggtcacttcgttcggatgattgaagtgggtgttcagccagatcgggtggtatttcttgagcatgttcaccaattccggtgtgatgcgttgaggcagcacgaccggggtgcgcgagccgatgcggatgatctccacgtggggaatggcacgcagacggctgatgatatattcgagtttttcgtcgctcaccagcagggcgtcgccgcccgagagcagcacgtcgcgtacctgcggtgtacgggcgatgtagtcgatgcagtcgtcgatctgtttctcgggggttgcacagtcgtgctggccggcgaagcggcggcgcgtgcagtggcggcagtacatcgagcacatgtcggtaatcaggaacagtacccggtcggggtaacggtgcgtcagacccggtacgggcgagtcgctgtcctcatgcaggggatcttccaggtcggcgggcgagcgcttcagctcctcgacggtaggaatggcctgcttgcggatcgggcagtgcggattttccggatcgatcagcgtcaggtagtagggcgtgatggccatacggagcgttttgagcgattcacggatgccttcctcctcttcagcggtcagcttgatgtatttcttgagctcatctacggtctcaatcctgttttttacctgccagtgccagtcgttccattgctggtcggtcacttcgggaaagaattcttttctgcggctcattgcgggtgtgagaggtgtcat

SEQ ID NO: 12 - DNA, 8399 bp, unidentified
  source 1..8399: mol_type = unassigned DNA
  misc_difference 1614: note = a, c, g, or t
  misc_difference 1615: note = a, c, g, or t
  misc_difference 1616: note = a, c, g, or t
  misc_difference 1617: note = a, c, g, or t
  misc_difference 1618: note = a, c, g, or t
  misc_difference 1619: note = a, c, g, or t
  misc_difference 1620: note = a, c, g, or t
  misc_difference 1621: note = a, c, g, or t
  misc_difference 1622: note = a, c, g, or t
  misc_difference 1623: note = a, c, g, or t
  misc_difference 1624: note = a, c, g, or t
  misc_difference 1625: note = a, c, g, or t
  misc_difference 1626: note = a, c, g, or t
  misc_difference 1627: note = a, c, g, or t
  misc_difference 1628: note = a, c, g, or t
  misc_difference 1629: note = a, c, g, or t
  misc_difference 1630: note = a, c, g, or t
  misc_difference 1631: note = a, c, g, or t
  misc_difference 1632: note = a, c, g, or t
  misc_difference 1633: note = a, c, g, or t
  misc_difference 1634: note = a, c, g, or t
  misc_difference 1635: note = a, c, g, or t
  misc_difference 1636: note = a, c, g, or t
  misc_difference 1637: note = a, c, g, or t
  misc_difference 1638: note = a, c, g, or t
  misc_difference 1639: note = a, c, g, or t
  misc_difference 1640: note = a, c, g, or t
  misc_difference 1641: note = a, c, g, or t
  misc_difference 1642: note = a, c, g, or t
  misc_difference 1643: note = a, c, g, or t
  misc_difference 1644: note = a, c, g, or t
  misc_difference 1645: note = a, c, g, or t
  misc_difference 1646: note = a, c, g, or t
  misc_difference 1647: note = a, c, g, or t
  misc_difference 1648: note = a, c, g, or t
  misc_difference 1649: note = a, c, g, or t
  misc_difference 1650: note = a, c, g, or t
  misc_difference 1651: note = a, c, g, or t
  misc_difference 1652: note = a, c, g, or t
  misc_difference 1653: note = a, c, g, or t
  misc_difference 1654: note = a, c, g, or t
  misc_difference 1655: note = a, c, g, or t
  misc_difference 1656: note = a, c, g, or t
  misc_difference 1657: note = a, c, g, or t
  misc_difference 1658: note = a, c, g, or t
  misc_difference 1659: note = a, c, g, or t
  misc_difference 1660: note = a, c, g, or t
  misc_difference 1661: note = a, c, g, or t
  misc_difference 1662: note = a, c, g, or t
  misc_difference 1663: note = a, c, g, or t
  misc_difference 1664: note = a, c, g, or t
  misc_difference 1665: note = a, c, g, or t
  misc_difference 1666: note = a, c, g, or t
  misc_difference 1667: note = a, c, g, or t
  misc_difference 1668: note = a, c, g, or t
  misc_difference 1669: note = a, c, g, or t
  misc_difference 1670: note = a, c, g, or t
  misc_difference 1671: note = a, c, g, or t
  misc_difference 1672: note = a, c, g, or t
  misc_difference 1673: note = a, c, g, or t
  misc_difference 1674: note = a, c, g, or t
  misc_difference 1675: note = a, c, g, or t
  misc_difference 1676: note = a, c, g, or t
  misc_difference 1677: note = a, c, g, or t
  misc_difference 1678: note = a, c, g, or t
  misc_difference 1679: note = a, c, g, or t
  misc_difference 1680: note = a, c, g, or t
  misc_difference 1681: note = a, c, g, or t
  misc_difference 1682: note = a, c, g, or t
  misc_difference 1683: note = a, c, g, or t
  misc_difference 1684: note = a, c, g, or t
  misc_difference 1685: note = a, c, g, or t
  misc_difference 1686: note = a, c, g, or t
  misc_difference 1687: note = a, c, g, or t
  misc_difference 1688: note = a, c, g, or t
  misc_difference 1689: note = a, c, g, or t
  misc_difference 1690: note = a, c, g, or t
  misc_difference 1691: note = a, c, g, or t
  misc_difference 1692: note = a, c, g, or t
  misc_difference 1693: note = a, c, g, or t
  misc_difference 1694: note = a, c, g, or t
  misc_difference 1695: note = a, c, g, or t
  misc_difference 1696: note = a, c, g, or t
  misc_difference 1697: note = a, c, g, or t
  misc_difference 1698: note = a, c, g, or t
  misc_difference 1699: note = a, c, g, or t
  misc_difference 1700: note = a, c, g, or t
  misc_difference 1701: note = a, c, g, or t
  misc_difference 1702: note = a, c, g, or t
  misc_difference 1703: note = a, c, g, or t
  misc_difference 1704: note = a, c, g, or t
  misc_difference 1705: note = a, c, g, or t
  misc_difference 1706: note = a, c, g, or t
  misc_difference 1707: note = a, c, g, or t
  misc_difference 1708: note = a, c, g, or t
  misc_difference 1709: note = a, c, g, or t
  misc_difference 1710: note = a, c, g, or t
  misc_difference 1711: note = a, c, g, or t
  misc_difference 1712: note = a, c, g, or t
  misc_difference 1713: note = a, c, g, or t
ttattccgtccagctgtacacccattcgccctgctggttgatgtagccgtattgggtcgtgccgtcgtcctgcaccattcccacatacgccagcttgccgtagaactgcgtcacaaagctgaattgcagcggaatcgccagttcgccgctttcgtcgagataccctgccagcctcgtgccgtctatatcgtacactgcctgcaatcccgacgggaaatacacgcccgtctggtcataatccggaaaattccacttcgcttcgctgatgattttaccctgcatgttcacccaaccgcagcggcgctgtctgcccttctccacaacgtacatgcacaagccgttctcctccggcgtccacagccgcacgatattttcgccttgcagggtgaacagctcctcgcccgccacgctgtacatcgtgaagctgtgttcgcccgtcggcagcacatagcagccatgccggacgtctgcatagtgcgtatccgtcgtgcgcatcacaactttccccgtttggtcgatgacaccataagtgccgtcggtcaattcaacctccgcatagccatcctcaaactcgaaggcatacgcgaactgcggctcaatcaccacttcgccgcttgtattgcagtagccgtataagccgtttgcacccaccacttcaaacagcccgtcaccaatctcaatatcgcagtattcctcatggatgccctccggcaggggatattccttccccgtttcgtcaatcagcagtgtctgcacaatgttgtaatcatcatcacagactgtgacaacggcgtacccatcataaaaattggaacccatgttgtccgaatcatactttgccggaatcaccatttcgcccgtatcgcggctgacatagccccacttgccggtttcgtctgccacggcaatcaagcggctgttcgactccctatgattcacgccccgccacttcaagccgctgtaaacaccgctctgcacatcaaagaagccttccagccattccgtgccgagactgtttttccccgtcgccttcttgtatagcagccaaatgcccgtttcgcgtccgccgtaatagaagccatcatagccgctgtctgtcactacattctcatccagtagcagcacaatttcgccgtcgcggttcgcgaagccttcccggtcgccctgctgaatccacgcataattgccccggaagtcgcccgcactgtcgaatttcggcggaatcacccaattccccgcctcgtcgatatgcccccacaagccgttgtcgcccttcgcggcgtaccaatacccctccgctgacgcgcagcctaacagcatcagcaggcacaatatcccgcacagcagtttcttcatgtgttttccctcctatggtgatttctgccttcatgataccagccttgcgcccgtttcgcaagcgctccggcgcaattgttacaattgaaaaaggcagggagaacgaatccccctgcccatattgattagttactccgccagcagcggcgcgacaagcccttccagcaccgtcagcgtcaccgacccgaccctgttgtacacgattttcccgtccgcatcgacaatgaccgtcatcggcagctgcgtcgagccgcccannnnnnnnnnnnnnnnnnnnnnnnnnnnnnnnnnnnnnnnnnnnnnnnnnnnnnnnnnnnnnnnnnnnnnnnnnnnnnnnnnnnnnnnnnnnnnnnnnnncgtgaaatcagggcatttcatgccgacttcgtagccaaccggcgtgtcgtcgtccggcgcttccgtggcttcgggcgcaagcgtttccgtcgcgacgggctgacttaccgattcttccaccgtgtccgccttgtttacctgccacatcaccacgcccagcactaccagcgccgccgtccacgccgccatcacgcgaatgcggcggttcgtgcgctttttgttgtcttccggcttcatcggctgcacttcgttcgctttcagcgtaattttgcccattttcatgctgatggctttcgtcgggcaaacgtccacgcacgatgcgcagtggatgcactcatggtcgcccacatgccgaatatccatcttgcagtgcgccacgcagcgcccgcagttcgtgcatttgcttttctcgaccttcacgccgagaatcgacacacgcgcgaacagaccgtaaatcgcccccagcgggcagaggaagcggcagaacgcacggtagaagaacacacacgccagcagaatcgccaccatgatgacgaatttgcgcgtaaagaggatgttgaggatggagaacttgcccgcattgaccgggttcgccagcaagcccattgcgccctcgaacgtccccgccgggcagatgtacttgcagaagcccggcacgggatactgctgcaagctgtacgccagcgggatgatgaccacaaacaccgccaacaggacgtatttgagatacgacagcgcatgggtgaagcggcttttcttcaccttcggcgtcggaatcttgtagaacaattcctgaatcagccccagcggacagagccagccgcagatggtgcgccccaggatcagcccgtagagcatcagaatgcccagaacgtagtacggcgcgcgcttatccgaggaggccagcgcgttttgcagcgcccccagcggacatgcgccaatcgcgcccggacaggagtagcagttgaaccccggcacgcaaacgttcttgatgctgccagtgtaaatgtcgcccttgatgaatcccttcacataggcgttgtagagcagggcggcgtaaacctgtatgagccgccgggtggtgggcttatgggcgctccaccatgccgcaaatttcttagccaaggccgatacactccgtacaaatattgattgccttcaccagcacatcgaacatgccgctgttcatcacacccagcacaatcagcgccaccgccgccgccgcgatgatcacgcggatgacgttcctgcccgtcgtcttttctgaagcggctgcatccggcttgcgcttcggggcgctcctgcgcagttccaattccttcatcaacaggcggaaattccactgctcagccgccatcaggaggatgaacgccagcccaatccacgggaacgtttcaatcaccatctggcgcacgacgacttccaaatcacgcgaggcaaaattcgaccagtccagcaggaatcgccctgccatccccccgcaaatcaagcacagaatcgccgcgccgcaccatacgcccgtgcgctgttttttcactttgcggatttcgtctgtctcctccgtccgcgcacgcagcatcagtagctgattctccaccggcgcgcgaagcgattccttctgctccggctttccggcgatgatgttcgccgccagcagcgccagaaagacccacacgctccacgcaatcgaggcgaagtgcgccgtgacaatttcccggctgtaaatatcgtgaatccgcagcccgttttcgcccatgttttccggcgcgatgccctcatgatagatggtcacgcactgccaaatcaacagcgccgccatcagcaccgtcgccactcccagcagccaccgaagcatggtgcgcaccgagcgtttgctctctgccttcattccgcgttcctcccactttgccgggcgcgcagtacgcccggaacgctactgactccattatagtgcagcaaaggggatgcgtcaaacaattcatcggattttcgctgtttcttttccgtttttccgattggaacccggcggcattgtgaaaaaatcatcaatttttgtccattttgtgccgtccgctcttgcttttccgcatcatctgtgataccataaacgcacaggctgcttgttcagcccttcaccatgaaggaggaaatatataatgggttttctggcaggaaagacggcgattattaccggcgcgggctatgcgaagctcagcaatggccgctgcggttcgattggctacggcattgcgaccgcttacgccaaggaaggcgcgaatctggtcatcacggggcgcaacgtgaagaaactgaccgacgcgaaggaagaactggaacgcctctatgtcgtgaaggtggtgtgcgtgcaggcggacgtgaatgacagcgcggacaacgaggctgttgtaaacaatgtcgtcaaacaggcgattgacaccttcggccgcatcgacgtgctgattaacaacgcgcaggcttccgcatccggcgttccgctggctgaccataccaccgaacagttcaatctcgcgctgtattccggtctgtacgccacattctattatatgaaggcgtgctacccctatctgaaggaaacgaagggtgctgtcatcaacttcgcctccggcgcgggtctgttcggtaactacgggcagtgcgcgtatgccgcggcaaaagaaggcattcgcggtctgacccgcgttgccgccaccgaatggggcaaggacggtatcaacgtcaacgttgtctgcccgctggcatggacgacgcagctggagaacttccagaaggcatatcccgaggcgttcaaggcgaatgtcaagatgcccccgatgggccactacggcgattccgaggtggaaattggccatgtgtgcgtccagctggcttccccggacttcaaattcatgtccggcgaaaccatcacccttgaaggcggcatgggtcagcgcccctaaccgctcgcatctttgctcccttctgcgcaccgcggaagggagttttttgtccctcattggaggttttttcgcatgaataccgaccgaatcgcgtattttctcgccgtcgtccgcgaaggcagcttctccgccgctgcgaagaacatgtacgtctcccagaccgccatcagccagcagattgcgtcgttggaaaaagaaatgggctgcgcgctgttccaccgcctatccaccggcgcggtactgaccgaccaaggcgagcagtttctcccctacgccgagcgcctgatggggattcagcttgaattgcaggacgctttcgccgatgcgcaccgtgtgagcgccatccacatcggctacaacgggccgctggaaaaagaactgattgtcgatgcgtacctttccctgcatccgcgcctgcccaatttggtgattcacccgctgtacctctcgctgacggccatgtccgacgccctctatcgcgggcaatgcgacatggtgctgacgcttcccggcgaaatcgaccagcggaacacctatcaggaggtactctacgatgtgccgatgattgccgccgtttccgaagcgtcgccattagcggaaaagtcggttgtgtcgctttctgatttacgcgcgcatccgttgattctgcttgcccccgaccaatcgcgcagcggacgcggcgcgattcacgactgggcgcagaatctgggattttcgcatccatcgattatttatgcggattcggcagatatgcaaattttgatggtttcgctgaatctggggatttccttctttccagcgagaaagccagcctatttcaagggcgtgaagctgattccgctgacggaggatattgggcatcatcggtcggtgctggtgtgcagacggctgacaccggcgattcggatgattcgcgactgcatgatagaggaaatgaaaaagggctaaacacgcggaaaaagcagcgtggcgaaaccagctcaatcgcgcggagtccagcggagacgaccaaagtgttttctaatcgtccccttgaccccttgggtcgccactaccagcattgacttgttccgcagtacaacgaatcacacccatccccgcactcaaaaaaagcaccagcccttcgcagcatttgccgcttcggtctggtgccatttttatcaaccgattactgctggtttgccgcgttttcacccgcaatgcggcccatcgacagcgcgttcaggaaagacgaaccggacatgtagaccagatcgtacagcgcgccgttggaggcttcgcccgccgcgtacaagccaccgatgaccgtgccgtccgcacgaagcacctgcgcggaggtgtccgtcacaacgccgccaatcgtgcctgtgtactgaggcgcaatctgcaccgcgtagaacgggccaaccgtcgcgaaattcatgaaatccacgcgcgcgccaaacgccgcatccacgccggtttccttcgccgcattgtagaccgcgatgcagtcaaggaacgcctgcttatcaaagcccagcttgtccgccagttcttcaagcgtgtccgcagaggtcactgccgggtcatcaacgttgttcgccaaaatcgccgcatagtcctcacggtcagagccgtagatgcagtagtacggcgccgcatgacggtaaatcaggctcggataattcagggaatggcagtattcattgacgaagcggacacccgtgttgtccacaatcggcgcctgactccacgggccgcccagagaggtcagctccgcgttcgtgccgtcgcccacgacataggacatgcccaagcgcgcacccttctcgtaaaccgccgcgccgatggcctccgccatcagaatgccctcgccggtctgacccgcggagccgtagaagtacgccacctgcgccgcgtcaacgggcgtgaagcgttccatcatttcctgattgttgccgaagccgccagtcgccaataccgtgcccttggcgtagatgttgaaggtctgaccgtccttttcgaccgtcgcgccgatgcagttgccattttcgtcggtcagcagcgccgttgccttcgtctccatccagtattccacgcccagctcctgattcttcgcatagagcaggtcggtgggcttgccgttggaggcatagtggaagcgatccacgccctcaatcaggtcgaagctcatcggacggccgaactcgaagccgttctcctccagccagtcaatcaggcccgccgcctgacccaccacgaagcggatgcggtcttcatccatgccgctgtctttgcggaaatactcgttgtggttgtattccacccacagatcgacgtaggcttcgcaggtatcctcgatgccgtacttcttctgctcggaggattccggcgccgcaatgccgccgcccgccatcgcagacgtgccgccgatggtcgccagcttttcaatcgcaatgacctttgcgccggcttccgcagccgccatcgccgctgctccgccagccgcgcccgtaccaatgaccagcacatcgcaggtcaggtcggtatagttttccttctccgccgcctcgaccttcgccaagtccgcgttcgtcagccccagctccgccagtgcagccgccgcggccgctttcaccgcgtcggatgtcaccgtcgccgccgtcacgccgtccacctcgacggagttgtttgccagcatctgctccgccagcaccttcgccgccgctccaccgatggaatcagtctgcgatgtcgcgtcgatttccacgttcaccagcttgtcgccgtccacgctcagcgtgaccgtcacgtttccgccgccaaacccttccgccgtcgcactcgctgtcttgacctccgccagcgccgtcgcgcaggccatcgtcagcaccatacacaggctgagcagcagcgccgtcagcttcttcatgatgaaaacccctttcctttttttgaatgtccccgtgcagggaagacactctggttgctcttcgcaactttgtgaaaaatataccatacttctctccaaaacacaaacatcaattcaggaagggggctataaggatttcttatactatttccagatgaaaatgcgcggcgcaagcaaatagcgcaaatgaattggaaaatcgtattatttttctccgcaattttcccttacccctggaaaaacgcaccgctttatgcgtctaatccattgaaatcaccatgaaaatgaaaggagggcaaagcatggagcagcaatcccccaatgaacgccgcttagaagattggatgcgcacctacggcaccgccatcctgcgcacatgcttcgtcatcctttccgacgcgcgtgaagccgaggatgccatgcaggacaccttcctccgcgcctggcgcgccatggacaccttcgagcagcgcaacggcgcgagcgtcaaaacgtggctgatgcgcattgccatcaatgtctgccgcgattatcagcggaaacggtggtttcggcacatcgacatgcggcacgcgctggaagacttgccgcagggcatgatgaccgtgctgccagaggatcgggaattgatgctggacatcctgcgcttgcccgacgacctcaaaaagccgctgattctctactattatcaggacatgaaccttcaggaaaccgccgatgcactgggcatcagcaagtcgacggtgcatacgcggctcaaaaaagcggaacaggcgctcaaactttcgctgacaggaggtgactgctatgtctga

SEQ ID NO: 13 - DNA, 16796 bp, unidentified
  source 1..16796: mol_type = unassigned DNA
gtgagaaaaaagaaaaaaatcttaatggttcataatttttatcaaataggtggcggagaacatacggttttcaaaaacgaagtagaactgcttcgagataatggccatgaagtaatagagtatacgcgtagcaacgatgagctgaaatctgataaatggaaattgctctttttgccttttacaacagtgtggtctcttagaacctatatagaaatcagaaaactgataaagaacgaacaaatcgatgttgtacattgccataacacgtttccattgatttcgccatctgtgtattatgctgcaagaagtatgaaagttcctgtggttcagacaatccataatttcagacttctctgcccgaatgggtctttttactgcaaaggcaaggtgtgcgaaaagtgccgcgagaacggaaacttcaaagaagcaataaaaaacaaatgttatcgaaactctacacttggaacaataattgttgcagcaatgttaacggttaacagaaaactaggaatctataaaaaaatatcatatatctttttgaccgaattcaacaaaagtaaattcgataaactcatcgatataaattcaaatcaggtattcgtaaaacctaattttgtaagcagaaaaggggagccaagcaaaggagcacacaagcgagtgttcatttttgcaagtagacttgaagaaaataagggaataaaactccttttggaattgtggaagttgcttcctaaggattattacctgcacatttatggagatggaactctcaaaaatttcgttgaaaaaaatgtgaaagagaatatttccttttacggatttactccacagaaaactatttttgaagatttatcaactgcaacagcacttgtatttccaagtatctggtatgaaggcttcccaatgattcttgcagaggcaatggccattggttgccctgttgtatcgacaaatataggcaatgcaggagatattcttgtcaattcaaaaggtggaacaacatttgaacctgacaagcccgatacatttataaatgctattgaagatgttttgcagaacaacgaaatatatcagaaaaatgcactggcctattacagcgaaacactgtcaaaagataaaaattatgttctccaaaacgatatatatgaacatttgttcggggggggggtaagaacatatatttatgccggaagacttgataaaggaaaaggaatactaaaactgcttaatgaatggatcaatctgccgggcacctatgtacttgaagtttatggagagggtgagtgcgcagccgaggttcgaaagttagcagctaaatgtccgaacattcatttgaatggattctgtccacaaaaagaattattcaattccttaaaatccgcagtcgcattgattacgccctatatatggtatgagggctaccctatgaatattgcagaatgtttctctttgggagtaccggtcgtatcaacaagtattggaaatgctggcgacttagtttcaaaatcaaatgcaggaactctatttgattttgaagtcaagggctcttttaggaaagcgttggatgcagtttatgaacaacgaacgaaattttcgtttaatgcttataactattacttgtgcaaccagacacctgcttcaaactatgaaagactaaataaaatatatgatacattgtaacaaactaaagaatattcctacacgcgtaaatataatcggtgtgccgatttcagtagtgaatatggagagttgtatttcctttttattctccaattgggatgctgtacatggaaattacgtctgtgtttccaatgtgcatacgacagttatggcacatgatgatccacaatattataaggtgcaagcagagtctttgctgtctgtgccagacgggaaaccactttctgtaattggaagaaagaaatttccgcagatgaatcgtgtcaccggaccggatttgatgcgaaggctttttgaagagtcgaaagaaaagaaaattcggcattacttttatggaacaacgcaagaaaatataaatgcgcttcttgagaaaatcaaaaaggagtatccatgggttgaagtagttggatatgagccttccgtgtttcgtccgctcagtgaagaagaggagaatgcgctcatagctcgaataaatcaaaccaatccagatattgtctgggtcgctttgggtgctccacgccaagaagagttttgctataaaatgcaaggaaaaatcaacggcctcatgattggcgttggtggagcatttaatgtcgtctctggcgtaattgatgaagcacctcaatggatgcaggatattagcttggaatggttttatcgcttcatgaaggaacccaaaagattatttagaagatatttggtgactaattctaagtttatatggttatcgctactaaatgaacacacaaaaattcgatgattagaaatttctgtaaatatgaaacaacttaaagtgaaaatccatacacatccaatatatattttctggatgctaaaaataatatttgatatgttttatcagctaaaaatgctgactgttataataacggcttttgccattctattgcttataattgcaataacaaaaagattccctctgaaaccttgtatcagtgatacaatcgttattttgattgcgttgatgtttacgggatcatggcttaaatcaccagaactatatcttgattatttgaaaatcatttcttcgctgcttttatactttttaggcagattctatgtaaaagatattgatacggtttgggagagcttaacatcatcgcttctttttgctctagttataaatcttattgtttgcctcgccggaaaaggaacaatagtatgggggtcagctgtcacatatagaggaatgtattttttcaaaacggattttgctgtcatgctctgctactttctaatcacatggatttataacaaaaagatggaaaaaacagattttattcctcttgctatcgcagtggtactaattgtactttgtaacgcacgaattatttatctatgcactatcgttgccttatttattttctttcagtatagaaaaaataaaaaaatcatttcattcaaaaatgttttgatgcttgggtgtgcgtttttagtttgcatatatgctcttcgctttgtttcaaacaccaaattttttcaggatagaggactactcagcttgcatttcgataaattatcagatttgatgaatgcaagcaatactcagggcagaaatgaaatctggacattgttactaacagcatttaacagacaaaatatttttacgaaaatatttggagcagcaatgaacttcaatcaaatatttggatattcaggattgaacgagcataacacatatgtaaaagttcttataaatacgggatattgcggattggtattgtttgcattgcttttttttattgcaattaaagaaataaatgatacacctgatagaaaacttagctgctatacattatctgttttaatggtgtttttgatagtcggtttttcagttcctaccattctatatacaaactgttcttggataccattatttatgattggtggttgtatatcctccgcacaagaaaattataatgtagaggtagttgaaacgtgaaaagcaatgtaattaaaaatactataatgctctatggtatgtcaatcgccaaaatcgtatttccccttttgacattgccgtatctgacccgtgtgctttctgtagaaagctacggcgtggtttcgtatgtaaaagctgtaatgcagtatatgcagttggttgtagattttggctttatgctgtccggcacaaaggatattgtaaacgcgaagaacgaccacgaaaaattggaaaaagaagttggtgacattctccttgcccgcgttttgttggcggcggcggcttttgttgccctgctgggaatgattgcggtgattcccctgctgcgcgccaacatcggatatacgctgttggcatttgtgacagtgtttttgtcggtgtttttgtttgattatttcttccgaggtatcgaaaaaatgcaggtcatcacgctgcgctttgtcgctatgcgcggcatcgcaacagcattgacttttatttttgtccactcggataaggacattttgtttgttcccttactggatgcagttggttcgctggtggctgttatccttgtgtttgttgaactgaagaaagaaaacattaagattcacttttccagtgtaagcacagcgtggaaaaagctaaaaaattcgtttgtctattttgcttccaacatggcaacaactgcatttggtgcattgaatacgctgctgattggcgcattccttccagcaacggaagttgcatattggagtgtctgtatgcagctaattggcgcggtgcagacgatgtatacccctattacggatggcatttacccagagatgatcaagacaaaaagctggaagtttatcaagcggcttctgatgatttttatgcccattgtgttcgcaggcagcgcgttctcgattgcggtagcaccgtatgtacttcagattgttggtggtgagcagtatgttgcagcgacttctctgttccgcgcattggtgccagtactgattttcagttttccgggaatcgtgctgggctggccgacattgggcgcactggacaaggccgcacaggtgacaaaaacaacaattctgtctgccgttgttcaggtggcaagcctgctattgctgattgcaacggggcattttaccgtgatgtggatcgcggtattccgctgtgtaacggagcttgtccttatggcaagccgcggatggtattgttggaaatatagaaaagagttttactaagccaatatgggaagtaacaggaggatatcgtgacggaagtagaggaaaagaatgcaaaagaaaccgataaagtagaatcggcattacaaagagcgattcatataacaaaattgcttattatatgggcggctcgctcattcttgtattcaggatgcacattttgtgtgtttcttgtttttcattttgtttacggaaaagcttccagcaatgaacttgtcgaagttggagcacttgtatgtggaatagtatggccgacattgtttgaaaacaatcaggtcgataaaattcacggatttttgaaaggatggcttttggtttcattctttattttcgctataaattatatagtagtgtaccgtagtgcatttattggtgttcaattgtcagatagagaggaaacctcatgtgcttttttgcttcttgcatttgggatattatcctggattttatgtgcggcagtttcgatttataaggaggtgcgctccgtatgttgattgaaaaagttatcacaaacttttctgatgtaagcctctgggcaatagcacttgtagttgggtatgtcctaattggtgcgattttgctattaagattggcatggaaaagaaaacataccaagatggagaatgtcactcaaaacacacccattgaacaaagtaaagaaatatacagagagagtcaaaatgacacaaaatctgaaaattcagacgccacaaaatatctacctgtcccacaagaacacgttagcataattgagcaaaaagatttctcacatttttatatcactctcgagcatcatcttaaaactccgtcaaaatttctagataccctaaaagatttgtgggaagagccaaatatttctaccggtatggttgctacacctgaaatgtttttctccagtcaagaattttatggaagttgttatgacaatcttgcatatgtcgaaaagaagcaaaatagcgttgttaaactccgtgagggcacacttataaatttaaacggaaaaatctaccgagttcgaaaaattgagattcaaaataaggccacgtcatcaagcgttcgcttagatttagaaaaactatcggttagcaactattcgctagagaaaagagataaccattatgcaagacttagaaggtcaaatagttgattgcttattaaggagaatcatatgaaacaacttaacgaagaagaagtaaaaatctatcagcttggcattttaaataccgttgctgatttttgcgagaaaaaccaaattcggtattggctcgattctggaacattacttggcgcaattcgccacaaagggtatattccttgggatgatgatattgatattggaatgttgcggccagattttgaccgatttatgaatatttttaatcaagcgaatggtcgctataaatttatttgtcgggagcttggcaatagtttctattacccctatggaaaagtgctggacacggaaactgttttgtatgaaccagatgaaaacggcatgaagatcagtgtgaatattgacgtttttgtctatgacaatgctcctgaaagcaaccaaaaagttgcagaaatgtacaaactaagagattggtatacaaaattaaatgctgttcaaaatggtgttgttggaacgcatggaattataaaagacattgtaaaaacggttggctttgaagttttgaagattttcccgaaaggatacttttccaaaaagattgttgataattcaaagaaatatgctgatacgaatacatcggcagtcggaaacttcacttccgtttccaaaatcgtttgcgagaaggatattttttcttctttcataaaggtttcttttgagggaagagaatacaatgcaccggttggatatgataagtggttgaccgcattttacggcgattatatgcagcttcctcccgaagagaaaagagtatcccatcatatgtataaagcataccagaagtaaaagtgcagtgggtgtgagagaatgtcagactatatattcctattcgatatggattcaactattacacgcaaggaagttttaccggaggtctctaagagaattggaaaactagatgagatgcgccggttaacagaggcaaccatgcgtggcgaaattccatttcggacaagctttttaaaccgtgtaaaaatactgagtgatatttccgtgagcgaagtcaatcaggtcgtttcagaaattccgctgaatccatatatcgctgattttattgagaataatcgagatcgctgttatgttgttaccggaaatttggatgtttggatcagcggcttaatgaaaaagttgaaaatggaaaaccattgttactgctcaaaagcggatgtcaaaaatgaccgaatttctaaagttgtaagcgtggctgataaagaactgatggtacgacaatttgttcagccaatggttgttgtgggcgatggtgacaacgattccggtatggcgcgcatggccgatattgcggttggtttcggtggcgtaagacccattgcgcagtcgcttctcagaaactctgatttcgcattttacgatgataaaagatgtgcagattttctgtggcaactgttgtaaagggggatgaccatgattaaaaagacggatgttaccgttatcatctgctgtgcgggaatgggtacaagacttggcatcggaacaacaaaggctcttgttgacgttggtggtgagccgcttattatccgtcagctcaagcttctggatgcgtttgatgatataagagttgttgttggatttgatgcagagcgcgtcatcaacgtagtaaaagaatatcgtaaggatattatgtttgtctgcaactacgagtatgagcataacggtcctgctgacagcttaaaaaaagctcttcttggcgtccgtaaatatgttatcactttagatggtgacacaattatgaatccagaagatttcaagcgtttcgttgaatttcccaatgaatgtattgcggtgacagaaaacgcgtccggtgaaacaatcagtgcgatggcacaaaacggaatggttgaagttttgtctaaaaagccgggaaatatgcagtggtcaggcattacaaaagtgcaagcggataaattgagaggaacttcttcccatgtgtacgaggtacttacaccatatcttccaatgactgcttttccattgcgcttgaaagaaatcaacacgcctaaagactatgaaaacgcgatggaatggttcgttgctggaatgagtgaggagtaaaacgatgaaagatttggtaattggtgttttaggcggtatgggaacatatgccactatcaaccttttcaagcagtatgcagaggtttttccagcggagaaagaatgggagaggccgcgtattatcattgataacagatgcactatgccaagccgtgtgcgggcatttctttatcatgaaaatgtcgaaagattgattgacgaaatggctaactcgattgatgggcttttgaaaatcgggggggggtcagcaagaatcattcttgcttgcaatacatcgcatcttttcctgcctcaaatttataaaaaagttccggaagcaaaatccgctgttataaatattattcattcctgtgtagagcaaatcagcaaagataatgtaaaacaggttttcctgcttggttctgaagggacgattgaatccaaagtatatcaagaggcactttccgaaaagggaattatctgtaaagttcctcagaaagaacaatatgtgcttttgcgaaattgcattgaggctgtgaagcaaaataagtattcggacgaggtaaaaaagtcattccaagagcttatggatgaatatgatgtcccgattatcttgggctgcacagaactgccgattctttatgaaaaatataaagatggcatcgatataacagtatacgaccctttgctgatcgcattaaaaaagttgaaagaagaatacgaaaatgagtaaaattctaacctttggagtatatgattactttcatttaggacatttgagactgttcaagcagtgtaaagcatatgcagattatttaattgtggcggttcaagacggaaattatatcaaaaaattcaagccggacgcaaaggtgctttatacaaccgaagaacgggtcgaaatgctagaagcattacgaattgttgataaagttgtagtgtacgagtctgtcgattctaaatttttagggacaattgattttgatattcttgcgcttggtgaagatcaccgtggtggacgttttgacgcggtagagcagtggtgtgaagagcacaacaaaagagttgttcgtttaaagagaacaaagggaatttgttcttctgatataaagaaatcgcttgaagcaaagtaagagaggaaaattaaaatgtctgcatttgataacgcaacccttatgatcactggtggtactggttcttttggttctaccgttttgaagcacttcctggattccgatttaaaggaaatccgcatcttctcccgtgacgagaagaagcaggacgatatgcgccatgagcttcaggccaagcacccggagaacgccaaaaaggtgaagttctacatcggtgatgtccgcaacccccagtccatccgtgacgcaatgcccggtgttgactacatcttccacgccgccgccctgaagcaggtcccgtcctgcgagttcttccccatgcaggccgtccagaccaacatcatcggtactgataatgtgttgcacgccgctattgacgctggcgtcaagcgtgtcgtctgcctgtccaccgataaggcagcttatcccatcaacgccatgggcatctccaaggctatgatggaacacgtcatctacgccaacgcccgtgtggctgccgagcggggcggcacgaccatctgctgcactcgttacggcaacgttatgtgcagccgtggctctgtcatcccgctgtttatcgaccagatcaaggctggtaaccccatcactatcaccgaccccaacatgacccgctttctgatgaacctggacgaggctgtggatctggtcttgttcgctttccaacatgcaaatcccggtgatttgttcatccagaagtctgatgcttccaccatcggcgatctggctaaggctgtccagcaattgttcggcgataccggcacgaacatcatcggcacccgtcacggcgagaagctgttcgagactctgatgacccgtgaggagcgtctgcgcagccaggatatgggtcattacttccgtgttgctgctgacaaccgtgacctgaactacgacaagttcgtggtcaagggcgaggtacataccatggcggacgagtcctacaccagccacaataccgagcgtctggatgtggaaggcactgtcaagaagattctgaccaccgagtacgtccagaatgcactgaagggcatcccgaatgtctaaggaaaagctgctgctgattggtgccggcggctttgggcgcatggtggcggagcaggcgatgttccgatatgattgtgctttcatggatgacggacagcctgtgggtgccgagatttgtggtattccggtggttggcggtcttgctgatttgccggagctgcggaaggagtatggcctgttggtggtgggtatcggcaacaatcggttccgggcacaggtgtatgagaaggcgaaagcccttggctttgcttttcccaatatcgttgcgcccagcgcctacatcagtccatacgcaaagctgggctgtggctgcgtggtgctgcaaaatgcctgtgtccagaatggtacgtccgttggcgacggtgttttgctgaatgccggaacagaggtccactgtgatgcagcggtaggggactacgccctaatttacaccaacagcgttgttcgcaccggtgcgactgtgggaaactttactcgcatcggcagtaactgcaccatctgcaataatgcaaccgtgccggatggcgcggacattccggactgcaccgcagtacactaagaggtgagagaatgaacattctagtcacaggtgccaagggcatggtaggaaccgccctgtgcaacaacctgaaaaacatccgggatgggaaaaacaagactcgcccggcattggatattaaagaaatctacgagtatgatctggattccaccccggcggagctggacgagtactgccagaaagcagacttcgtgttcaatctggcaggcgtgaaccgcccggagaacccggaagacttcatgaagggcaacttcggctttgcatctgatctgctgaactgcctgaaaaagcacaacaacaaggcaaccatcatgctgtcctcttccattcaagccacgctggctggtcgcttcggcaacagcgagtacggacgcagcaaaaaggctggcgaggaactgttcttccagtatgctcaggagaccggggcaaaggtggccgtctaccgcttcgtgaatctaatgggacatagccgccccaagtacaacagtgccgtcagcaccttctgctgggcggttgccaatgacgagcctttcaccgtcaacgaccgcagtaccgagttagaactgctgtacatcgatgatctcgtagaaggaatgtttgacctgctggagggcaaggagcaacactgtgaatttgacggtgtggagaccgttctgaaagcagatggtcgctactgctgcgtccccgtgacccacaaggtcacgctgggcgagattgtagacttgctgcaggagttcaaagcacaacccaccaccctgatgatgccgaaaatgccggacggctcttttgccaagaagctgtactccttgtatttgacctatctgcccaccgacaagtttaagtacgccctcaagatgaatgcggacaaccgtggttcctttacagagctggtacacaccgccgattgcgggcaggtgagcatcaacatcagccgtccgggcatcaccaagggacagcactggcacaactccaagtgggagcttttcattgtggtcgcaggtcatggcttgattcaggaacggaacatcaacactggggaaacggtagagtttgaagtttccggggacaagattgaggctgtccatatgattcccggctggacccacaatatcatcaacctgtcggaaacggagaatctggtgacggtgatgacctgcaacgaaatttttaaccccaatcacccggatacattcttcgagccggtgtaagagaaaatactggttgacgttaggagaattttatggaacacaattttacatggaaaaacgatgggcgcacaaaggtcatgattggttgcggtacccgtccagagattatccgactggctgcggttatcaagcgctgccgggaatattttgactgctgcgtggtctattacaatcagaattgggacagaaacctttccaccgttttctgggaggattttgaactgaagaacaccttcggggaatatgggccggacattcttgtgcccgtggtgggcgagaatctgggtgtgacctgtggtaacattctgggacgcagctatgagcttctgtctgagctgcagccggagggctatctggtgctgggcgataccaactcctgcctgtctgccatctctgcgaagcggctgcacattcctctgtttcacatggaggccggcaaccgctgcaaggatgagtgcctgcctgaggagactaatcgccgcatcgtggatgtgatttctgacgtgaatatgtgctattccgagtttgcccggaagtatctggcggacaccggactgcccaaggaacgcacctaccagaccggttctcccatggcggaagtcctgcacatgaatctggagaagatccagaaaagcgacgtgctggagcgtctgggactggagaaggacaagtacattctgctgtctgcccaccgtgaggagaacatcgactcggaaaagaacttcctgagtctgttcactgccatcaatgcgctggcagaaaagtataatatgccgatcctgtactcctgccatccccgcagcaagcatcgtttggagaagagtggcttccagctggaccctcgcgtccgggtcaacgagccgctgggcttcaacgactataacaagctgcaaatgaacgctctggcaatcgtctccgactccggcactctgccagaggagagcagcttctatctgtccatcggtcaccccatcgccgccgtgtgcatccgtaccagtacggaacgtcccgaggcactggaagctggtgactttattctggctggcattaccacccgggaacttctcaacgccaccgatatggcgatcgagatgaagcagaagggtgttctgggcaagccctgccccgactatgtggacgagaccgtgtccatgaaggtggttcgcatcattcaggggtatgtgaatgtggtcaataagatggtgtggagaaaatactaattatccacacaacagtcatgtgaaagcatggctgtgctgctcaaatatgctacctctccgtggtgagcagcaggcaacggattataatccggctaaagcatatattcgttaaatcgctctttggatgaggaaacaattacataatgggaaagtattttggaaccgatggcttccgtggtgaagctggtattgatctgactgccgaccacgcctacaaggttggccgttttctgggctggtattataacgctctgcgcgagcgcaacggcaacaatgagcccgcccgtatcgttatcggcaaggacacccgccgcagctcctatatgttcgagtacagtctggttgcaggtctgaccgcctctggcgcagatgcctacctgctgcacgttaccactacgccctccgtggcttatattgcccgcgtggacgactttgactgcggcatcatgatctctgccagtcacaacccgtattatgataacggcatcaagctgatcgactgctacggtgagaagatgcccgaggagaccctgcttttggtggaagattacatcgacggcaaactccatgtattcgataaggaatggccggagctgccctttgcgcaccgtgaacacatcggctgcacggtggactatgtggcaggccgtaaccgttatatgggctatctgatctctctgggtatctattccttcaagggcgtgaaggttggtctggattgcgccaacggtgcaagctggaatatcgctaagtctgtttttgatgctctgggcgcagatacctacgtcattaacaacaagccgaacggtctgaacatcaacaacaacgctggctctactcatattgagggcctgcagaagttcgtggtggagaacggtctggatgttggctttgcctttgatggtgatgccgaccgctgcctgtgtgtggacgagaagggcaatgtcgtcaccggtgaccatatcctgtacatctacggctgctacatgaaggagcacggcgaactgatgaacaacaccgtggtcaccacggtcatgtccaactttggcctgtataaggcctttgacgagcagggcattggttacgctaagaccgccgtgggcgataagtacgtttacgagtacatggcaaaaaatggctgccgtatcggtggtgagcagagcggtcatatcattttctccaagtacgccagcaccggtgatggtatcctgaccagcctgaagatgatggaagttatgctggcgaagaagatgcctatgagcaagctggctgagcccctgaagatctacccgcaggttctggagaacgttcgtgtcactgataaaaaggccgcacagaacgacccggcggtgcaggaggcagtcaaggccgtagccgaagcgctgggcgataccggtcgtatccttgtccgcgagtccggtacggaacctgttgtccgtgtgatggtagaagcccctgaccatgatacctgccagaagtacgtctctcaggtcgtggaggtcatcaagaacaagggctacggagtttaaaattctgtacaggaattaattacagcagtgcaagcctgatgatagattacttaattcaatcgtaaggataggcagtggcgtctaacggtctatataagcgaaaaaactggtggatttcatgaaagagcagaatggaaaattatcaagggatgaattcatatcatttgttaaagcagtgctgaagaaaaaatcattggaagaaaacaagccactttattttgagtacagagtatctggaaatagcaagcttgcagaatctgcaagaagatttgatgcgtttgcgccagatggatttttcagatatcaagagcctgtgattttcgaatttatagatagcaaatcaaaacagctggaaaaacgaatccaaacaatcgcggatgattatagaaaaaattatgaggcggaaactatcttcattgtaaacgccagaacatctgctgaagaattagaccttacagtatgggatatcaatgagataaacaaatggattaaagagtatccagctgagtatggtcatgtgtgttcatggaatattgaccgtaaaagaactacacaagacaaagaaaagtttcaaatttccgaaaatctgtacagagatgacttatatcaaaaaaacaatgatatttatacaaatgcaatacgtacctgcatcgaagagaaaaagggcgttgcaattgtgctgggtgcgggtgtttcgaaggaacagggagcaaaaacttgggatgaattgctgagagagtttcagacggaaattgaaaggcaacatcttttggatgattccgaggcggtttttcaggaagttggcgggacgagtcttacaacagctcagttatgcaaagatgtctgggcagatgagaaaacctttgcttggcaaatccatcaaagcttatatgataaagcgagagagttggatgtgaataccgagttaggggagattgcgcagctggctcaaaaatgtcggaaagatcaaaatttcaggattttaacctataattacgatgacttccttgaacagtatttagagtggcgtggagtaaagtgttgttccatgttcacaacgaaggttagatactcaaatggtcaggcgagtgcggatttttatggcgtgaatggacaaccaaatcaaagtttacggctctatcatgtgcacggatttttaccaaaagttgcaacaaaaagtcaattggatacactccatataagatcaatctgcctgacagaagctgactataatatgctttataatcagccttatagttggccgattgcaagtcagctttctttcttcagagaaaatatatgtttgtttattggatgcagtttaagtgatcccaatatccgaaggcttttggaaatcacagcgtataatccaccgaagcattatgctattttacctatgatgtacaaaagtaccgatgcatctggtgctgtggtgccaaaacagttcacaacaaaagaccggcttcaaattgaaaatcatttttatcgcatcggaattaacattctgtgggtaagagattacagcgcaattcctgaatggttgcacaagttgaatcgatctattgtttaaatgaagatatattttcattctacaaaatacacctcttgcgaacataaaagacgagtgttatactgaagccatcaaaaaacattggaggtgtcccctatgccccgtcccaaaggaagcaagaacaagcccaagaccgcaaaagcaaccgttgactttgctgcacagattgccgaaaagcaggccgcaaaggaagctgctgccgccgaaattacatccatcactgcgaatatcgatgcgctgaaagccgacctgaaaaccaagaaggcagagctgaaatctatcgacaaggaaatcgccagaatcgaggctaaaaaggtcaaggctgaaaccaaagcagcggaatcggcaaagaaagccgaagcagaggacgtgctgaaaaagctgttggccagtggtgtgagcgcagacgatattctcgcaaagttgaagtga

SEQ ID NO: 14 - DNA, 16295 bp, unidentified
  source 1..16295: mol_type = unassigned DNA
ctgataaccggggtcatacgcatggaatgtcaggcgcggttccgtcaagaaaaaattgtatagcgcaacactggcaatggagcccagcacaccgcaggtgtaaccgctggtagacaatgcggtgaacagcacccccagcatatagagcataataatattatagcgcgcaaagtccagttgcaagaaaatgaagccgatgagcgtgatgcagctcaggatgcctgcggtgatcagcagatcacggacagacggcagaagcggacgggtgaacagcttccgtcctgaaccgtagccgttctctgcagaagcatccgggatgatataaatatccagattaggcgcagtcagcgtcaatttttcagtcagtgacggtccactccagaaatggcggcgatgtacgctggagcgccccagtacgatttttgtaatgccggagatgcgggcaaactctgcgatctgctgcggaatgtcatctccgtagatcgtagaaatgtcggcacctgcctgctctgccatacgaatgtgctgctgcaagcgccgacagtcttcttttcccatctgatccgagtcaggcgtccggacatacagagctgtaaaggtccctccaaacgcctttgccatcgttgacgccgtccgcacgatctttgcattggagggagaggacgacagacacgccagaatatgttcagtgggtgggtcgttctgattcataaagatcacctgccttgcccacagtatagcacaatttgatggtcacgaccaccagccacgtctttttccttcctgtcgaaggatctccttccgcatgtgatccagcgcatctgctgcccggaaaccactcaacatgactccaagaaccatcaataacaaagcgacatccatacgatccgtcctatctttttagagccggaaacacttctggatcgatgcgtattttcccaaaaccagcatactttcatcccggcacagctgcgtatccggcgtaatgctcatatcgagctttccgtcttttttcagtgcaagaatgttgatgttatacttttttcgaatattgatctcgccgatcgtgcgattcatccattccggcggaatagtcacttccatgatggcgtggtcgtcctgcagctcgatataatccaggatgtgttcggagctgtatcggatcgctgcccactttgccagctgcttttccgggtagaccacttcatccgcaccgttgcgcagcagaaacttggcttgtacatcccgctctgcacgcgagaccacaagctttgcgcccagctccttgagcagtgatgttgtttccaacgaactctgaaaattgccgccgatggttacgatacacacatcaaaattgccaacgccaagggaacgcagaaagtattcgctggtgctgtcaccgatctgtgcattcgtcacataggaaagcacagcgttcacacggtcttcgttgctgtcgatcgccatgacctgatgacccagctcattcagttcctgcgcaatatggcggccaaaacggccaagcccgatcaaaagaatcgatttcatacttgtctcctttatccgattgcgattttctcctgcggcagacgagagtgggcagggctgctgccaaatgccgcatagatcaacgtcaatccgccaacacgtcccaaaaacatcagtgcgatcagcaccccctgcgaaaggatgcccaactgcggcgtgatgcccaatgtcagacctaccgttgccacagccgaagcagtctcatacaaacagaccgacatcggcagctgctcggccgcagcaatgacaaaggctccgaggaagaacagcgtcaaatacatccctgcgatcgtggcagcattcttgaccgcggaaccatctatgcgccgcccgaaaaattcggcatcttctctgcggcggaaggtcgcccacatattggccagcagaacggcaaatgttgtggttttcatgccgcctgccgtggagccgggcgaaccgcccaacagcatcagaaccaccatcaatgcctgtgaagtgctgcccatcgcagcaagatcagcggtgttaaagccggcagtacgaggggtaacggattggaacatcgacaataaaatgcgctgccgggcagagcctgccgtgaactcgaagcaataaaagtacagcgccggcagcaccagaagaaacgccgttgtgacaaggatcaccttgctctgcatccgatagcggtgaaagtcaaggcggtatgtacaaatgtcctcccatgtcagaaagccaaggccgccaaagacgatcagggccgcgatcactgtggtaagcaatgggtttcctgcataccgtgtcagcgaaacaaattttgcatcctctgttcccagcaggtcaaagccggcattgcagaacgccgaaatggaatgaaacagtgcataccagatcccgcgcaaaccataatcggcgcagaacgtcggcagcagcagtgcagcaccggccaattcaaacagggcggtgatccgcagaataaagcctgtcagccgcacgatgccgcccatctgtggggcagcggtggcttcctgcatcgtgctgcgctgcttgagggagatctttcgcccggaaagcagcgcaaaggcagcgcccaccgtaatgacgcccaatcctccgatctggatcagaagaaggatcacactctgcccgaatgccgaccagtagctgccggtatcctgaaccacaagcccggtcacacaaagggcagaggtagaagtaaacagcgcctcatggaacggtgtaacgcaccgctgctgtgcagcaatcggaagcatcagaagcaacgcgcccaccagatcaactgccgcaaaacctgcaataatgacctgaaaagaagaaaaacggtgctgcctgtaacgaggatattgaatcataaaagctcctttacctatccgtgtgcataaagattagcatggaatagataaaagagtcgtaaagaaaattgtagaagtataaagattccattaaaattgatcgggcaacaccaaataacaaatgctggacatcaccagttaaaaaaaacagtaatatccagcattcattcagatttctaacccatggctcccggccgcattcttcaaatattcttccggctcgctatccagaatcaaattcgcgtagcccagcggatcattgtagatgaggtagtctaactccgacctctgcgccatggtcacgtccagtgcatcctcgaccccggtgcagtcgatggaaatttttctcccatcccggagcagcagctccacgcagccggtgtccatgttgaaatgacaaactcttgcatcgtagcctagaattcttcccgcatggaagaaccctagggctatcttttttgttataaaagtgtttggaacaaacgcgccgcctgcatcggcacgatgcagaacaaatggggtttgggcacagcccaacaagcattttgcaaagcaaaatagcatttgtatagacgaatgccctgcttgctacaaccgcataccgcttatctcgctggaacacctcttgattttaacacaatcggatgttatcctattcttatagaaatctccgaagggcaggtgttttcatgtacaatcatcagctggaaaccttcatccgtgtggcggatgcaggcagcttcaacaaggcggcagaggaaagctacatcacgccaacagccatcatcaagcagatcaacctattggaagattcccttggtgtcaagctgttcgagcgtactcgccggggactaacactgaccaaagcaggccgttccatgtatcaggatgccaagtacatcattcaatactgccatgattctgtcattcgtgcccggaacgcaatgcaggaggattccaacgtcatccgcattggttcctctcccatgacacctgcccagctgctcatggaactgtggtcgaaagtgcagaccatctgcccggacatcaaattccagattgtgccttttgaaaacaccccggaaaatgcacgggaaattctggcggacctcggcacgaacattgatgtagtaggcggcatctttgatgaaacgatgctgcatctgcgcaaatgtgccggtctggaactggttcgcaggccgttttactgcgcggtttccatccatcataaacttgcggcaaaagaccgcttgcagatcacagacctgtacggcgaaaatctactgctgatgcaccgtggatggagccactatgtagatgaactgcgggatgatttatggcagcaccatccacaagtaaatatcgtggattttgaattttacagcatggacatcttcaaccgctgcgaaaacaccaacgatgtgctgctggcaattccgggctgggccaatgtccacccattgctgaaagtgattccagtagattgggattacggcatcccctatggtatcctgcactccccgaatccaacgcctgccgttcagcgttttctggatgcggctaaaatagccagcaaggaattgtatcgctgatacgccactgcaacgagaagctgctgcatgagaaatcatgcagtggctttttctttttacaaaagatgcacttgacctaaagctgactctaagtgttacaatcagggtgtcaagcgggttgtttgaacctttgagttcaaacaagtgaacaaaatggagattccgggaaatgcagacttgcgctatactggaaccagaaaaagagagtacctcaaaggaggaacgaccaatgaagaaagtcttgattttgtccggcagtccccgcaaggacggcaactccgacctgctgtgcagtgagtttatgcgcggtgcgcaggagagcggcaacgaagtgcaaaagatcttcgtgcgcagcaagaagattgtgccctgcaatgcctgctattactgccgcgaccacggcggcaagtgtgccctgaacgatgacatgagcgaaattctggacgcaatgcaggcggcagatgttatcgtgatggcaagcccggtgtacttctactccattgatgcacagatgaagatcatcatcgaccgcagccttgcccggtggacgaacattccgaacaaggagttctatttcatcatgacctgcgcggacgataaccgtgctgccatggcctgcaccttggagtgtttccggggctttaccgcctgcctgaatggtgccaaggaaaagggggtcatctacggcaccggcgtatatcggcccggcgaggtgatgtcctccccggccatgaaggaagcctacgagatgggcaaaaacgtctgatttcccagttttatataaaggagtgtaacggctatgaacaattttctgtttgaaaacaagaccaaggtttatttcggcaagggtggcgtgaaggaatatctgggctgtctgctggagcactacggcgataccgtgatgctggcctacggcggcggttctatcaagcacaatggtgtctatgatgaaatcgtcggtattctgaacgccgagggtaagcgcatcgtggagtttcccggcatcatgcccaatcccacctacgccaaggtgcaggagggtgcaaagctggcccgtgagaaccatgtggatttgatccttgccgtgggcggcggttccgtgtccgactgctgcaaggtggtgtctgcacaggccaaggtagacgaagatttgtgggagctggaaaacaccaagcatactcgtcccactgcgttcatcccgctgggcaccatcgtcacggtgttcggtaccggctccgagatgaacaacggcgcagtcatcacccatgaggaaaagaagattaagggggccctgtggggtgcacaggccgactttgctttcctcgaccccacctacacgttgtccgttcccatgaagcaggtcatttccggtgcgttcgacaccctgagccacgcgatggaaacttacttcggcaagccggacgagaacaacctctccgatgacatcaacgaagccgtcatgcgcagcgtcatccgcaacatccgcgtcctgttgaccgacaaggacaactacgaggcccgcagcgagctgacatgggcttcggctatggccgaaaacggcatcctgaaaatcggcaaggtcaccgacttccagtgtcacatgatcgagcatcagctgggtgcctacaccaactgcaaccacggtgctggtctggcggtcattcacccggtgctgtaccgtcacctgctcccggccaacaccgcacggttcgcccgctttgcacagaacgtctggggcatcgacccggcgggcaaatccgagctgaaactggcacaggctggcgtggaggctctggcggccttcatcaaggagatcgggatgcccaccacctttgcagaactgggcgtccctgccgacaccgacctcaaggctgtggccgattccaccgtgctgaccggcggctgctgcaagaagctgagccgcgaagaactgctggacatcctcaacgagtgcaagtaatcaaggaacgaaaaatacaaaaggagctatttattatggaattcattactctgaacaatggcgtcaagatgccggcagagggcatcggcaccttcctgctgaccccggacaaagctgaaactgccgtgctgagtgcgctgaaagacggtgcacggcttatcgacaccgccaacgcctactgcaacgaaaaagccgtgggccgcgctatgaagaagtccggtctgctgcgggaggaaattttcctcgaaaccaagctgtggccgaccttctacaccgatgccgatgctgtggacaagacgctggcacgtctggacaccgactacatcgacctgctgctcattcaccagcctgccggtgattacgttgccggttatcgcctgatggaaaaggcttacaaggagggcaaagtccgtgccatcggtctgtccaacttcaacgaggagcagatcaaagaaattctgagcatctgcgaagtcaagcccaccatcctccagaccgaagttcacccctacgcccagcagaaagaactgaaagccttcctcgccgagaatggcatggtgattcaggcatggtatccgctgggccacgctgacaagggcctgctggaagagccgttgttcacacgccttgcagcaaagtacggcaagagcaacgtgcaaattattctgcgctggcacattcaggcaggcaatgtggtcattcccggctccaagaacccggcccacatccacgacaacttcgatgtgttcgattttgcgctgaccgatgcagaaatgcaggagatcaccacgctgaacaaggataaacggtattatgaggtcacggaggataagctggcggcattcgccaccatgtttcctcccgtggaagatcagaagtaaatttcaagcagtttgtagctgggtgcggagagtttttttgcggaaaatgaaccagatgaaagggtaaatgaagatgaataagatcacgcgcaaaagttttctgaaagttcttgccgccaccatggtgggtggtgcagccgcttccgcgctgacgggtgcagcggctcctgtttccattgacgagacaaacggcaaggtaagccgctgggtaaagaacaacctgaacccggacggcccgctgacgattgccaagcaaggaatgttctcctccggcggcacggtcacggcaccggtggcaggcacttatgatgccaccaccaactggctggacactacccgtgcaggcaacaccgctcatgtggatcacgctaatgttctgtatcaaatcccggcagacagcaacggttggccgatggtttatctgcacggctatggacagtcccgcatgggctggataaccaccccggacggccgtcagggctgggccgatctgtttctgcgcaacggctactctgcgttcttggtagaccagccccgccgtggtgaggctggcagtaccgcccagatgagcacggacggtttcctcgatacttggtctgccaactccaaggactacaagcccggcgatcaggcatggtacacccacttccgcattggccgcgttgccccggaacggtacgaaggctcccagttcccggagggcgatgctgcacagaatcagttcttccgccagatgacccccaacaccggcgacttcgatcaggcagttgctgccgccgcactgggcgaggtgatgaaggacgtgcagaccctgaccggccacaagtccattttcgtcacccactcgcagggcggtgcagtcggctgggatgtgcccgccgacaacattgccgccattgttgccattgagccgggcggaacccctgccatcggctcggagcagtacacgaaactgctgagcgcaggtattccaatcgctatctactttggcgattacatcgacaacggcccggaagatatcatgtccaccagcttctggcggcgggtacgggacggcgcactggcctttgccgcccagtacaatgccgatggcggtgactgcactgtggtcgatctgccgaaaatcggcatcaccggcaactcccacttcatgttccaagagctgaacaacaaagagatcgctgatcacatttatcagtggctggagagccgcgcactggcatgagcggttctctgagattcccggcattttacatagatagaggcgtgtttcgtatgaagaataaaatttcccgccgccagtttttgcaggttgctggcgcatctgctgccgccctgctgctggcttcctgctccggcaattccgctagcagtgtgagcagttcttctgtggcttccagtgaagccgcatccagcgcggctgcttcttcggaagctaccagcacggtaacgactacgggcaaaacactggtggtgtatttctccgccaccggcactacacagggcgtagcgcagaccatcgccgacaccgtgggtgctgacctgtttgaagtcgttccgtctgacccctatacctccgatgatctgaactggacgaacaatgacagccgcgtttcccgtgaacacaacgacgagggccttcgtgctgtggctttggaaagcaccgatgtggacggctgggacgattacgacaccgtgttcatcggctaccccatctggtggggcattgccgcatggcccatgagcagctttgttgccgtcaatgacttcaccggcaaaaatgttgttccgttctgcacgtccctttcctccggcatcgggcagagcggcaagctgctggcagaattagcggacgccggcacttggctggacggccagcggttcagccacagcagcagtgaagccgacattgcaagctgggtaaatggcctgaacctgtaagcagagcttttgtgtgaggagaattttctcttgcggtaatttttgaaatagagggtaaatcaaaaggagaatgtttgtatgaaagcattgctcatcaacggcagtccgcggcccaacggctgcacctttacggccctgaccgaactggcaaatacgctggaagccgagggcattgaaaccgagatcgtccatgtgggcaacaaggacatccggggctgcatcgcctgccgccgctgccacagcaccggctccaacaagtgcgtctttgatgatattgtcaacgaagtagcccccaagttggctgaagccgatgcctttgtcattggcgcaccggtgtactttggttccccggcaggcggcgcgatctcctttatggaccgcctgttcttcagtaccctgaacatcgacaagaccatgaaagtgggtgcttcggtcgtgacctgtcggcgcggcggcaacacagcttcctacgatgtgctgaacaaatattttaccatgtgtgggatgccagtggccagcagccagtattggaacatggtctacggcggctctgccgaggaggtcaagaaagatgccgagggcttgcagaccatgcgcacccttggccgcaacatggcctttttgatgaagagtatccagataggcaagcaacagatcggcctgcccgaaaaagaacctgctgtcttcacaaacttccatcattgaggaagtgttccatattcctccttctttgttgcagggaaagccgggacggaaacgtcccggctttcccattttcctgatttttgcgaggtgattttatgcgcagcgtgattttcgcggtttccaccgctttgaccgttttattatccgcctgcaccggggcggcatcctctgtgccagtcaatacggtttcttcggtttcggccagcacatccatcacgacctcgtccgaagtggattcggctgtttcggagagtgcttcttcggaaaccggaaacatccagactgggcttgtccgggagcagacattggacagcactgaggagctcatccattacagctactacctgccggaggattacgaccccacccggaagtaccccatgatggtggtcatgcccggctataacatgatgtggttcggggaatcttcctccggcagcaatctggactggacggggtttaccagctggacgaaccttggacaggatatgatcgtagtgtctgcccagctcaccgactggggcgacacttcggcgcggcaggccatcgctctgacggagtatttcatcaatcactttgccgtagataccgcccgcatttacgccgcaggctactcggctggcggcgaaaccatgtcgcgggcagttgccatgcggcctgacctgtatgcagcttatctgcatggagcatcccagtgggacggcggttttgcgcccattgcagaaaacggcgtggcggtctacatctacatggcgcagggcgatgaatactacggtgtgcagaaagcacgggatgcctacaacggtctgcacgatgcttacgccgccgcaggctggacggatgaacaaatcgacaccgtgctgcaaatgcagaccccggacaacgcctttttcgatgcgcaggggcttcacgtctaccatgctgccgcaaatgttgtctttgatgatgccgatattctgaactggatcgtttccaaacacaagtgataggagagaaattttgaaccgacggcaattcacaaaacttctggcgggtgcagggctgcttctggcaggctgccgggcaggtactgcacccagttcctccaccccggaaagaaaggattccatgcaaacgaccacccaaacttatacccgcaccacgcccatcgaaaccgtacggaatgacccggttttcggtgattatgggcagctgatcttccctgtggaacgctcttattacagcggcgacacgctggagcagctgcatcttacctactataacaacatcgacccggacgaaacagtggacatctgcaacaccctgcgccagcgtgcagcggacgggcagaccatcttttacgatatttacaccgaggacgaaaaagctgctgacccggataaagctgacaccggcttattctacttcaagggtaatcccggcgcaaaattttccatctgcaacgcaggcggtgcgtttgcgtatgtgggggccatgcaggacagctttcctcatgcactggaactttcccgcaaggagtacaacgcttttgcgctcatctaccgccccggcgcacagaccgcctgcgaagatctggcacgggccattgcctttgtctttacccatgcggaggaactggaagtagacaccagcggctactccctctggggcggttctgccggggcacggatggcggcgtggctgggcagctacggcacggcatccttcggtgaacaggcgtatccgcaaccgggagccgtcatcatgcagtacaccgggctgggggaagtctacggcaacgagccgcccacttatgcctgtgtgggtgaccgggactacatcgcagacgaacgcgtgatgcgctggcgcattgaaaccatccgctctcagggcacccctgccgaggttgaagtctttccgggccttgcccacggttttggcttgggcaccggcacctctgccgaaggctggctcgatcatgccgtagcgttctgggaagaaaacacctgaaaccgtgaggaaactgttatgacgaaaaaatggactgcactgcttctcgcggcagtacttgctgtcggcctttcggcctgcgacaccagccgcgcagaagcccccggcagcaatttggaaagcggagtttccgccatcgaggatgctatgacgaaacgaaatgaaaccgaaagcagctcattcccggcaggcagcgacctgcgcatcggcacttctgacgacaccgttgcaacgccggatgatttcccggcagcatacaactacgacactggaaaaattgaggattattcccgtaccgccatgctgcaaaagatgccggaaccagtggacaatgcgaccgtgctgaacacctcggcagaccctaaccatattcaggcgttgtacctgtgggaagaaggcaacgttccggctaaaacgcagttcaccgctgcaatgaccggttattttgacaactgggatttccgcccctatgtgacggcaattcccgtccgcaccggagtacaaccgaaaggtgctgtggtgttgatggcaggcggtgcgtatcagttccgtggaaactataccgattctctgcccacggcagcggctctacgggagctgggcttccagaccttcatcgtagattaccgtctgtcgccctacacgcaggaggaaggcgcgctggatgtagcgcgggctgtccgctttgtgcggcagaatgcggatgtttacggcattgaccctgacgatattgcagttatgggcttttccgcaggcggcattcaggcgggcgaatttctgatgcactacgatgaagatgtcaacggcactgctctggatgaaagctatgtacccgatgcgctggatgctattccggctcacgcttcggcggcgggcatgatctattcgttctatgggcggctcagcgtgggcaacatggacccggactggctggccgagggtgatctgccgccaacattctacgtttacggcacggaggaccccttctaccgccaattccagcagcagtatgatgtgattcggaatatgggcatttccaccggacgcatcgtgctgaatggctggccccacggctttggctcggatggcggctgggtgaacgattacgctgcatggctggaaagtgtttttgcaaataaggaggaattttaacatgaagtatcgtactttggacagcgacctgaccgtttctgctgttggtctgggctgtatgggcatgagccatgcctacggcgcacctgccaacaagaaggaaatgaccgaactgctggcgcaggccgtgggtatgggctatacgttctttgacaccgccgaagtctacggcacaccggataatccccacgacaacgaggaactggtgggtgctgccctgaaaccctaccgagataaaatcgttctggcgaccaagttcggcatccattttgacatgaccagtacggcagtcaacaagccgctgatgccggattcccgcccggaagttatccgtgcatcggtagatgcctccctcaagcggctgggcaccgaccatattgacctgtattatcagcatcggcttgaccccaaggtacccattgaggaagtggccggtgtaatggctgacctgattcgggagggcaagatcactcactggggcctttcggaagccaccgaggagaccatccgccgagcacacgcagtctgcccggtaacggccatccagaaccgttactccatgatggcccgctggtacgaaagcctgttcccggttctggaagaactgcacattggttatgtggcattctcgccgcttgcaaacggttttctctccggcaaatacgataagacttccaagtttgaagcaggcacggactaccgcagcgtcatgccgcagttccagccagacagcattgaccagaactgcgccctgctggaactgttacaccgtcttgccgccgagaaaaatgcaacacctgcccagatctcactggcgtggatgctgtgcaaaaagccttatatcgtaccaatccccggcacccggaaactcaaccgtttacaggaaaacgccggtgcagcggatattgtgctgtctgccgcagaagtggctctgattgacgaagcactggcgcacatggaaatgtcgcatgtgtttggcgggagccgcattgtgaaagagtaagacagcagctttgacgatgagcttcaatagatcatgcggaggtaattgtttttgataatgaagaaagcaaagagtatgaacctttgagtactaacaggtgaacaaaacggagattctgctcagggggtcaaacggttataatgaaaccagaaagagttccagcgcggcagggagcggaaaagcaggattccgctccccgatctgaaacaaatctaaaaagaaaaggagaacacgattagaccgcaacgatgacggcaccggtacgctggaacgctacaaaaaggattccttttactgatatcagaatgtcatcaaaaccaacggcgcatgcctgaatgaacaggtaaaaaagataacaaggcattttgtcttgcggaaggagaagattgttcatgaaaaaagttgaagtcatcgtccgtactacggaggacaattttcctccgcaggaaaaagttgttttgaaattcacagagcaaacggtttcttcggcagaaaccgatgccgtgctgagttatcccggattggaaatccatctggagcatcatcgagtattcaaaaatggacaggaagtgtatatgagccgttatgaatatggcgttttaagtttaatggcacggcatccggggcaattgttcacaaaagagcaaatatttgaagctgtctggcatcaggatagtgaaagctgcctgacggccgttaccaatgcaattggacggcatccggcagaaaattgaagatgacagagctgcacctgtttatatccgaacgatttccaaccttggctaccaattcatgccgactgtttccgcagaatccgtagaaaaagattcctgataacgataaaagccatactcaaagggcagtttagaccttgggtatggcttttatcattataatgtggacgactgaaaactgacatccttgcaatcgaaaacaatcttttctaaaatacagaaaaaagattttaggaggcgataagatgttaacgcatcaaaaaaagcctgtctgctgccgtaagccagaccgccccgaagcaagcacaatcgttccgttccaccatccacaatcgtgccgatgtgttatattgcgccagcttcccgccatgggaggctggcgtttttgcgcttttggagccaaagtgccgcagtccaccgtttctcctatgatacagcagcaaactttatatttgggagggaaagtcatgctcgatcataagaaggaagcgattacggaacactggcagttttgccccaagtgcaatataaagctctatcgaatgaccgccgactgcactggattcatccacataaaatgctggcgttgccgggaaatgttatggctcaacctttccattcgagccaagtaagcattggtttcataaaaatcgggtgcaacgcactctgaatatggactgttagcaccgagcaacgggccattgccacatggcaatgtatgaaacgtagcaccaaatggccgggcagcagcttgactgaaagattttcgcttgaaaatccttcggttggctgttgtccggctattttttatagcttcagatggcctgctcccgaaaaggagcaggttttatgtttgccctcttttcgtggctgccccaagcggcgaaatatccgtagcatctccgaattttcgacttctcacgttttatcgaaaatttggaggttacacatgggctttaattatggtttggaaaagaagaattttgaccgtcagtgggctatgttgcgcaagcagtacgaggacgctggcatgagcatcgaagcgattcagacaatgtacgaatatgactggtctgttttcaatgctgcgcgttcttaccagaaccacacgcaggaaatcaccgctccgtcctttgaacagggcgaagaatcctactcgccccttatgaacaagtatcaggaagcaatttctgttaccgaacactaccgcgaaaccaagagccgcttcacatggattggcgaaattgagaatgaacggctgttgtctgctcttgaaaatttgtcggacgcagacctcaaccttgtcaccatgtatgcctatgaggggtacaccgtcactgaaatttctaaagttttaggtgtcgcgcagcctactattagtatcaaaatcaagagaattactaaatttttgaaaaacttcaatttcaatgctacgaattga

SEQ ID NO: 15 - DNA, 5467 bp, unidentified
  source 1..5467: mol_type = unassigned DNA
tattcacccactgaatccgaagttatgatgaacgagaacaacgatgtttttacaatggaagacgagccgatagcctctgttatgcagaatatgcgcaaaggctcgaaatggctgtccgcatttctggaaagttaccgtcctccgttggacggggagcgttacctgacggacggcgaggtgtcggaactgctccgtgtgagccgacgcaccttgcaagaataccgcaacaaccgcgtgttgccctttatccttttgggagggaaggtgctttacccggaaacggtgctgcgcgaggtgctggaagcgaactaccgcaagccgttatgatgttgattttgtagttagaaataaaaagattacttttgcaatctgtttacgcttagtcgtaatcacttgctcaatctcatgtgcgcttgggtttccaatgccatcgtacttccagctcgttctgggagcagtttcattctttaatacgttgggaaaggggggctttaagtatgacaaaaactataatgaaggcggtaggggctgtagcggcaggccgaaacaggaaagttcatatgaggatagcaagtgtaaccatatattgcgatgaaggctccaagggttcgaatcctgccaccccgacaaaagccactgataatcagtggctttttcttttttcggacacatttcggacaaattatatctgaatattgattattcaataacctaagcaaagttaagttaagctagaagaataacccttcttaaagaatgattggaacataatgcttgtttctatagagcgtgaaaagttcatcttattcttataaaaaatcaagagggctaggagtcttttgcttgtctatgtcagtgatatgagtgtagatcatagtcgtttttatattttcatgacccaataactcttttacaattcggatatcgatacctgattggattaaatgtgtggcataagaatgtcgcccagtatgtacagagccttccgactgaacatttgctttgatcaatgcttttttcagaatcaactgtacacttcgttcgctatacttgccacccttctcaccttcgaagaggtactcctttggcttgaatgcttgataataatgtctcaaagtcgccagcaatttgtctggtaatgatacaatccgatctttattacctttgctttgatggattctgataattccatcggaagattttatgtctttgattttgagattcaacagttcgctaagacgtagtccacaactatagattgtcatcagaatagccttgtgttttagattttgagtgttatcgagaatatttcttacttcttcttttgaaaagaatttaggtaatttagaaaatgagcgtttcgggtataagtaatccagttggatttttttgtccaatatcagttcgtacatcttcttgattgcgcccactaatcctttttgataggaaacactaattttcccattttgaactttttcgtttataaacgcctcaatatctgacagtggaatttcttcaagggagggatatttactaacatgtttaagaaatatactagcgtaatccttgtacgatctaatggtattgccagcatatctctgcatcagcaatctcttttcgaaggtttcaagtatgatttcgctattcatatcagggaaatagtattttataatattttgtttcgctatttgtgcggttttattttttaaatacaaatatatcaatatcttatgtagaaagaaaagtcaaataacgaaacacgtatatagggttggttaagcgaaattttccgtatattcgtttcgttaaaacagatgttgttatgcggcagcttaaaagacgacaccaaaccagaaaaatcatcttgacaaccacccgactttgaactacgaaggatgaaatttttcagggacaacttccagcatttccaaaaaacagtttaaccattgacttggagacaaacaaacaatttgagcattaaggtttaaaccgaatttttccgaaattgtcctgacctgacttttcctgaaaatcgactttaaagctgtttttacagataaatcaggtttctctaacagacaggaaataaatgctaagtatttggctttaatcttaaaatcaaaaaataagtgttttcttttaatgtttaacagggctgattttacagttggcggtggcaagaaactttcaggacctacctcatagacaagtttcaaatcaaaaaaagtatgatagaaaacggtatatggattgtaaagcttccttgaaaataacttttatgtaggttcgaactgaaggacaatggaacctcccagaaaattttcaagattctcaaacatcaggattttgaaaatatcggaagtaatgccataaggaatatttgacaccactttgaaaggaaatttcggaactgcaaaattcctaaaatcacaaccgacaacttgaacatttcgggcatcagaaaataattttcgtaaatgttcaaccaaagctgtgtcgttttcaatagcaacaacattgttggcaatttttaataaatgaacagtaagaaaccccttgcctgccccaatatctaaaaccgtatcctgattacttatatttgcttgtcttattgcatcttttattagcactttatcaatagtaaagtgctgacccgtaaaacgaacgggcaatttcttttttgtcattagtaacttcttacaggtgaatacttgaattcaaatcacagagatattcttttataattatacaacggcaaatttagtaactttgctcgataaattaacgagaaagaagaaaaaatgaaagccgacagcataacatcacctatacgcaagcaggggtttcgtgcttctatgacagtgaagtggtaaatttgaagttcagttcttcgtaggaagttcagtggttaaaatccctgcctgcgtatagctgagaaccgttgtgggctattttgcacacgacacgacaaacatcaaatgactatcgaaatatgagtttattaaacaataaaaaagttgcaattatcggtggcggaccagttggactaacaatggcaaacttgttacaacaaaacggtattgacattaccgtttacgaaagagatgaaaacccaaaagcacgagtttggggcggaacgcttgaccttcacaaaaattcaggacaagaagcaatgaaaaaagtaggattgttgcaaacctactatgatttggcgctacctatgggcgtaaactttgctgatgagaagggtaacattatagcaacaagaaacccgacactcgaaaataagtttgacaaccccgaaataaatagaaacgcgttgcgaaaaatgttgcttggcagcttgaaaaatgacacagttgtttgggatagaaaatctattgggcttgaacaagaaaacggaaaatggctgctacattttgaaaataagccaactgcattggccgactttattattgtttccaatggtggaatgtctaaaataagaaattttgtttcagataatgaagtcgaagaaacaggtacttttattattcagggcgacattcctgaaccagaaacgaactgccctgaattttataagttgtgcaacaacaatagactaatgaccgcacatcaagggaatttattagttgcgaatccatttaacaacggaatgttaacttacggtgtcattttcaaaaagcctgaagaatggaataatggaaaaggattagattttaaggacacaaaaagcgtttccgagttcttgacaaacaggttttcaaattggagcaatgaatacaaggagttaattcgttcaacaacttttttcgttggtttaacaataaaaatatttccgctagacaaaaagccttggaagagtaatcgtccgttacccataactttaattggcgacacagctcacctaatgccaccttttgcagggcagggcgtaaacattggactaatggacgctttgattttgtcagaaaatcttacaaacgggaaatttggaacgatacaaagtgctattgatgactatgaacaacgaatgtttgtttacgcaacagaagcacaagcggactcgacaaagaatgaaatagaaatgcgaaatccgagctttacttttcaacagctaatgaatgtataactcgacagacaaaaaaaacagcccacaacaatcggcttgaaacgcaaggcggggtaaacgtcttcgattgaacatttttttctaattttacggtatcggcttcgattgaaaggtagtggtaaaaacccgccctgcgtcaagccgccggacgttatgtgccatttttgaatgacaatgcgaatagatacagacaaacaaatgaatttacttagtgataagaacgttgcaataattggtggtggacccgttggactgactatggcaaaattattacagcaaaacggcatagacgtttcagtttacgaaagagacaacgaccgagaggcaagaatttttggtggaacccttgacctacacaaaggttcaggtcaggaagcaatgaaaaaagcgggattgttacaaacttattatgacttagccttaccaatgggtgtaaatattgctgatgaaaaaggcaatattttatccacaaaaaatgtaaagcccgaaaatcgatttgacaatcctgaaataaacagaaatgacttaagggctatcttgttgaatagtttagaaaacgacacggttatttgggatagaaaacttgttatgcttgaacctggtaagaagaagtggacactaacttttgagaataaaccgagtgaaacagcagatttggttattcttgccaatggcgggatgtccaaggtaagaaaatttgttaccgacacggaagttgaagaaacaggtactttcaatatacaagccgatattcatcaaccagagataaactgtcctggattttttcagctatgcaatggaaaccggctaatggcatctcaccaaggtaatttattatttgctaaccccaataataatggtgcattgcattttggaataagttttaaaacacctgatgaatggaaaaaccaaacgcaggtagattttcaaaacagaaatagtgtcgttgattttcttctgaaagaattttccgattgggacgaacgctacaaagaattgattcatacgacgttgtcatttgtaggattggctacacggatatttcctttagaaaagccttggaaaagcaagcgcccattacccataacaatgattggggatgccgcacatttgatgccgccttttgcagggcagggagtaaatagtgggttggtggatgccttgatattgtctgataatctagccgatggaaaatttaatagcattgaagaggctgttaaaaattatgaacagcaaatgtttatctatggcaaagaagcacaagaagaatcaactcaaaacgaaattgaaatgtttaaacccgactttacgtttcagcaattgttaaatgtataa

SEQ ID NO: 16 - DNA, 17105 bp, unidentified
  source 1..17105: mol_type = unassigned DNA
gtgttattggtatatgaaaataaaaatacgggattatcatccgagtggaaagaaccagtacatgtgccgccgcatctgcatgaagcaatagaagttgtgtatgtaacggatggagaagtagagcttggagtgggacctgaattgttccatatggatgaaggggattttgcaataatatttcctaatgtaatacatcattatcaagtttttgggaaaaagaagaataaggtaatatacttatatcttgatccaaaactatttccctcatactataaagaacttcagaattacagtcctgaaaatccagttgtgaaaaaaagaaaagtgcatccggatgtagtaaatgctataaaatatttggcagaagtaacagatggcaatccaatgctgataaaggcatatgcacagatgattttagcacatgttttcacaacaatgccattgattaataaaagtgcagtaggaagagatgatcttatttacaatgcggtggaatatgtagccaaaaattttagagaaaacatcagccttgaaaaaatggcatatgaattgtgtgtaagcaaatatgtattatcaagaatgtttgcgaagacatttcattgtaattttagtaaatatgtgaatggagtccggttaaattatgcagttgcagaacttgaaaacacgatggattctataacaaacatatgtcttgattgcggatttgaaagtcaaagaacttttaaccgtgtatttaaggatagatataaaattacacctagagaatatagaaaaaggatggaacatgataaataatattttatatgttgatggccaaattccccacaaataatatgcatattattagaaaaagcagagaacctatattctctgcttttagttatatgttttttctgtattcagatggtgataaaccttttaacttttgaaatattcggctgaaatacagagggttttcatagcccacaatcctggcaatttcgttaatgttatattgaggattctgcagaagtgcttctgcattgtatattcttttacgcataataaattgtttaggtgtaataccagtatataagcggaaattacgaatgaaccagcttgtacttatattattttgctctgcatagctatcaatattaattggttcattataatgttcactaaagtatgaaacagcattgtctatttcatcagctttatgtgtattatcatgagatacagaagataaaaaattccgatgtagtcttataaaaatttgtcgtagatacatttctagcatttcaggatatccattctgacacatctgcagttctttgatcatttcacgaaacagaatctgatattcagatccagaaccacagtagaaaactcttttgtcatcagttaatccataggaacgaagaagattggtaacattattcccagtgaaatgtacccagtaaacttctacattatcttttgcataatattcatatttttgaggttctttaggtctgtataataccatatgaccagcatgaacgatggtttcatctgaatcattattaaaatggaagtgggcttttccagatgcgataaaaagtaattggaaatccagtctgccacgcgggcgccatgtagggagttttggtttagtatatagcttataggtaccacacatggttataattagttcctttgatttatctttcctgtcaatagtggaattgttcaagtatgcgttattggtatacatataaagccccctttacgtgtaattaaaaaataatatgcatatatactgttgtaaatataggaaatcattaaatacacaatgttattttatcattttatgcatataatgtctatttactttaataaaacaagtcataaatgaaacaaactaatgtaatgttataaattatttgaattataggctttgaatgaaaaatcataatggattaggaaaataaaaattatgcttaactaggatgactaataatattgttttgtgcataatctgtacaatttatgatatggattttttgggctattttttgtatattatgtataacaagaatgcaaggtgattttacggataataaagaataacaataggattaatttctattagtaagtataattagatatgatcggctgataaaaattattcgttattatatattatccgataaatgttgatttaagtggggtgattgagatgcagacagatatattgatacaaagtttcctagatggcgtgtatgatgagagactttttgatgtgtatgctgatgagacgaaaatttattatcaaagagaacgctatatcaatgcaataaagaaattcgagcagtgctataagccgggagatgtggaaatattcagtgctccgggaagaactgagatttgtggtaaccatacagatcatcagaacggagaggttttggcagcctcagttaatcttgatactattgggatcgttaaaaagacgtatgataatgtaatcagattggtttctgataactatgatgaaatcattatccggcttgatgatatatctgtaaaggaaaaagaaaaggaaacaacaaaggctttgataaaaggtgtggtttctggatttcttgagagaaaatatgcagttggaggttttcaggcatatataacaagtgatgtgctgattggtgcgggactttcatcttcggcagcatttgaaactttgattgggacaattttatcaggactttataattgtggaacagtttcagcaacagagatagccattattggacagtatgctgaaaatgtttatttcggaaagccttgtggtctgatggatcagatggcaagttcaattggtaatcttgtacatattgattttgccaacccagaatacccatatgtagaaaaaattgattttgatatggaaaagtatggttataggttatgtattacagatacaaaaggttcacatgctgatttaacagacgaatatgcagcaattccaaaggaaatgaaactggttgcaaaatattttggaaaagaagtgttgcgcgacatatctataaatgatgtattggataatattactgatttaagaaaaaaatttggagacagatgtgtccttagggcattgcattttatctatgaaaataaaagagtacaaaaagaagtaagtgcattgaaagcaggaaatataggagcatttctagatgatgtgaaagcgtcaggcaattcttcttttaaatatctgcagaatgtttactcaaatcaggatataaaaaatcagaatgtatctttggcattatttgtaagcgaaatgtttttgggacaaaatggtgtatgcagggtacatggaggaggttttgctggaaccatacaggcgtttgtgaagaatggatatgtggagaattacaaatacgaaatggataaaatatttggtaaagattcttgtaaagatttgagaataagaaaatatggtggcataaaagtgttatgaattagaaagaaggtattattatgagaatcttggttttaggcggggctggttatattggttcacacacagtatatgagctggttgatgcaggttatgaagtaattgtagttgataatttgcttacagggtttaaagaggcagtacatcctcaggcaaagttttatgaaggagacataagggacaagatattccttgataatattttatcaaaagaaaagatagatggtgttattcatttcgctgccagctcacaagttggagagagtatgaaaaatccactgaaatactataataataatttatgtggaacagaagtgttgcttgaaagtatggttgagcatggcattgataagattgtattttcatcaaccgcagctacatatggagagccagaaagtatacctattttggaaacggatcgtacacttccaacaaactgttatggtgaaacaaagttgtcaatggaaaaaatgtttaaatggacatctaaggcgtataacttacgatatgtttcacttcggtattttaacgcttgtggagcacacccgaatggaaaaatcggagaggcacataatccagaaacacatttgataccgcttgttttgcaggttccgaacggaaagagagaatacatatctgtatttggaaatgattatgacacaaaggatggaacctgtgtaagagattatatccatgtaaatgatttagctcaggcacatatccttgcaatggaatacctctcaaaaggcggagaaagcaatatttttaatcttggtaatggggtaggttttacagtaaaagaagttattgagacagcaagaaaggtaacaaatcatacaattcctataagagaagaagaaagaagaactggtgatccttcagtgttgatagcatccagtgaaaaggcaaggaaagtgcttgggtggaaaccgcagtatgcagatctagagacgattatttcaacagcatggaaatggcatgtaaatcatccggacggatactaggaggtataacatgaatgaacttatttcagaattagtaggttacggtattgaaaaaggattggttgaggaagacgataaaatttatgtgattaacagacttttagagttgtttagacttgacagttatactcagacggataaagcaatcagacagttatcagaaattctatctgatatgactgattatgcagcggagcatggattgatacctgaaaatacaaatgtatacagggatttatttgatactaaaattatggggattttaacacctgcaccctctgtggtcagagcaaaatttacagatttgtatgtcaaaaatccaaaaaaagcaaccgatttctattatcaattcagtcaggatacaaattatatacgtaaggacagagttgcaagagataaaaaatggaaagcagacacacagtatggcaagatagatattacaattaatctttcaaaaccagaaaaagatccacgggacatagcgagagcagcaactcaagcaaagaatgattatcctaaatgtttgttatgtgcagaaaatgagggatatgcaggaacactctcacatccggcaaggcaaaatcatagaattattccactaaagctagatggacaagattattatatgcagtattcgccttatgtgtattataacgagcactgtattgtgtttaatgcaaaacatacaccgatgaagattgatgaagctgtttttgtaaagctattggattttgtaagacagtttccacattatacactaggctcaaatgcggatttgccgatagtaggaggttcaattcttagccatgatcattttcagggtggagcatatacttttgctatggcagaagctccatatgagtatatgtttgagattgcaggatttgaagatgtgacagcgggatgtgttaagtggccactgtcagtcataagattgcagggaagcagcattggaagacttgcaaaagtgtctgactatattttgcaaaagtggcgtgggtatacggatgaagaggcatttatttttagcaaaacagatggagtaccacataatacaattacgccaattgcacgtatgaatgggaatttatatgaaatggatttggttctcagaaataatattacgacagaggacaggccatggggtgtgtatcatccagaggaaaaactgcatcacattaaaaaagaaaatattggattgatagaagtgatggggcttgcagtacttccttccaggctgaaaaaagaaatggatatacttgcaaaagctattattgaagggaaaaatattcatgatatagaggaaataaaaattcatgctgactgggtagatgaatggctggactcttatgatattacaacagaaaatatagagagtattattcagaaagaaattgcagattgttttgtgcaagttctggaatgtgcaggtgtatataaacgcacagaaaagggatttgctgcatttaaacggtttttgtcagtactataaaaatcttcacagtggttttaatagatcacatcatagactttacagtgtaagaaattcgtaaaagtaagcagacacaaagctgaggaaagttgtaaaactgtattcagattttatttaggtactacggatataaacatttattgtaattaaagaagttccggcatcaacagaattaactgttacacatactgtatgtaaaaataaaaatgatgacagttattttaaagataatacgatagctgctgtaataaaaaccaatggagttacatttgaaatcaccaatactgccacacctgattttataaaaaatattatagagaaatttagtacaaatataaacagaaatgaacacaacctccagaaatggaggtttatgtttaacaaggtgttcacgaaaagaaagataagaaaaatcatgaaagaaaggaaatagaaaataatgaacaaacaagaaagcgatatcttgaatacgcttttattggaaccatttatcaatcaaaggattctagcagaagtatcaggtcattcattaggagtagtaaaccgttcactaaaggaacttatcaaagctgattatttagatgaatctatacgtccaacagtgaaagcaattacagaattcaaacagaaaactccacagcgtgcagttatcctggcagcgggattcggtatgcggatggttcccattaatacggaaatgccaaaaggtcttttgaaagtcaatggtgagccattaattgaacgtattatcaagcagcttcatgaagttgggattaaagaaatttatgtggttgtaggtttcatgaaagaaaaatatgagtacttgattgatgaatatggtgtagaactcgtggttaatgctgattatgcggcaaagaacaatttacattcgatcaaacttgtaaaagaacatttggagaatgcttacattattccttgtgacatttggtgtaatcgaaatccgtttcatcgccatgaattgtattcctggtatatggttagtgacatggtggtcaatgaaagcaatgttcgcgttaatcgtaaaatggaactggtaactgtgccagaaagttctggtggcaatgcaatgattggtatctgctatctggtaaaagaggatgcagatacagttgcgaaatgtattgaagagttatgtaaaaatcagcggtatgatggagcattctgggaggaagctctttataacaaggatcggatgatagtactagctcgcgtggttcattcagcagatgtagtggaaatcaatacttatgagcaactacgggaaatcgacagcaattctaatcagttgaaaacagatgcaattcaggcgatttgcaatgttctaaaagcaaagccggaagcggttacgaatattactgttttgaaaaaaggtatgacaaatcggtcttttctgtttacttgcaaaggaaaaaaatatatcatgcgtattccgggtgagggaactgaccagcttatcaatcgtcgtcaggaggcagcagtttatcaagttattgaaggaaagcacatctgcgatgatattgcgtatatcaacccacaaaatggctataaaatcacggaattcttggaaggcgcaagagtatgtaatccattgaactacgaagacgttaagaaatgtatgatgcggctacatgcgttccatgacttgaaattaaaagtaaatcatgagtttgatattttttggcagacggagttctacgaaacactgtgggatggaatgccttctatttataaggattatgagaaaacaaaagcaaatgttttgtcactaaagccttatattgatgcacatgtgggagaaaaagttctgactcatattgatgcagtaccggataatttcctttttgtggagaaggacggaaaagaagaaatcagactgattgactgggagtatgcaggaatgcaggatcctcatgtggacgttgcaatgttctgtatttattctctttataataaacgtcaggttgatcaattaattgcagcctactttactgaaggctgtagtgatgagattagaatcaagatttattgttatattgcagcttgcggacttttatggagcaactggtgtgagtataagagaaatctcggtgtggagtttggtgagtattcgcttcgacagtaccgatatgcaaaggattactatcgaatcgttcaagaagaattgaaaaagcaaggggaggaagagtaaatgccaaaagtagaaagagctattattatggcagctggtttaggaaatcgaatgcacccagtgacactgtcaacaccgaaaccgatggttaaagtgaatggggtgcggatgatcgacacagtcattgatggtctgcatgaaaatgaaatttatgaaatttatgttgttgtcggttatcttaaagaacagtttgtgacacttgaaaaggagtattctggtgtcaggttgattgaaaatccatactatgatacttgcaacaatatatcttccctttatgtagcacgagagcatattgaaaatgcaattattctggatggtgatcagattatttataatcctgaaattcttgcaccagaatttgaacgctctggttataacagtgtttggacagatggtgaaacggatgagtggcttcagactgttgagaatggcattgttacggcatgcagtcggacaggtggaaaaggcggatggcagctgtacagtatttcccgctggactgcagaggatggaaaaaaactaaaacgtcatctcgaaattgagtttgaacaaaagaagaatcaacaaatctactgggatgatgtggcgatgttctgctacccaaaggagtatcaattgggtatctgtcctatgaatagagacgatattatagaggtggataatctgagtgagctaattgctctagatgccagctataaaaaatatgtggaggaaaagtaaatgaatactaaaaaagaacatgcaaaaatagactggatgataacactggtgcccttggcaatcgtaattgcattatgtgttctattctttttggcaccagaacaatcgaatgcagtactgagccagattcgtttttttttaggtgatacttttggaacatattacttagtaattggattgggaattttcattctttctctgtatattgctggctctaagtacggtaacatagtttttggcgagcaaaatgagaagccgaagtattctttttttgtgtggggttcaatgatgttcacctgcggtcttgcagcagatattctgttctattcgttttcggaatgggtgttgtatgcaactgatccgcatctgacagagatgggaagtattcaggattgggcaggcgtatatccactgttccattggggcttcattccgtggggattctatctggtactggctgttgcctttggctttatgctccatgtaagaaaaagaaaccgtcagaaatattcagaggcttgccgtccgattcttggaaagcataccgatggctgggcaggtcgcattattgacctgttagctgtatttgcactcctggctggtactgctaccacatttagcgtggcaacaccgctgatggcaactattattggcgaactgttccatgttgccgttagtcgtactgtaatcaacattattattcttctgattatctgcgctgtatatacatattctttactgcatggatttaagggaatcagcaagctggcaaacatttgtatttatatgttctttggtctgattgcctttgtgcttctgtttggtggagaaacacggtacattattgaaactggtttttcttcacttggtcgaatgatacagaactttgttgatctgtctacatttactgacccactccgtacatcgaactttccgcagaattggacgatttactattgggcttattggatggtttggtgtgtggctgctccgttctttatcggaagcatttctcgtggcagaacagtgcgtcagacaattcttggtggctatatatttggtgttggttccacattgacgagctttattgtactgggtaactactctatgggaatgcaggtgaccggaaaagctgactttattgcacagtatctggagagcggtgacctgtacgggatgatcgtatctatcattaagacgatgccgagtgcgcctgttattatggtagttgttttgttgacaatgattgctttttatgcgacgtcttttgactcaattgcattgacagcatcctgctacagctatcacacattgagagatggtgagcaaccgaataaggtcattcagttgatgtggtgtattttgctgattttgcttccgattgcattgttgtttgcagaaagttctatgaacaatcttcagtcggtgagtattgtggcggcattcccgattggagtggtaattgtgatgattgcggttagctttatgaaggatgccaaaaaatatatgggaaatatggaagaaaaaggtcagcaagaggttgataatgttgacaacgaaaaataaatttgacaggagagcatgttgaattttaaaagtacaatataaaaatgtgttgatagtaatcagaatctttgcagttggatataaaagggtcaggttttataataatttttctcccgctaatttcagaaaatgtctattcaggtttatgtttttagaaaataaactgcctttgcaagatatacttgtaaccatgaatattcctatatgtaatattgtaaattatatttcggatgacgagatgattgctgggtgtacggataggattgggaatgggtggattaatgataatgaatgggatgaaatatataacataaatttataataagattgaagtcagcaaaggcaattgcgtcatggtaaaagccggtacgattcatgctatcggagctggcatcctgatatgctaaatccagcagaattcaaattgtacttacagaatgtatgattgtgaccgcagggacaagttcggaaataagcgcgagctgcatgtagataaggctcttgatgttgtggatactaaaagatatgtgccatatgaaagcagcattaatgcatatgatgaagctacgaatgaagccgcagcaactattgaggcggactcatcagaaggtcagttattagtaagctgcaaatattttgaatgttataaatatgatatatccgattcagtatctattaatgttgatacagcttctttccgctctgtgatatttacggaaggatgtggaactatacgcgtaggagaagatgttaaggcatataaagtgggtgatagtttctatataactgcaggtaataaaactgtggaaatagagggaaactgtgttgctattgttacgaaggtctgattgagatgcaggtatgtatttgtctagttctagttttgttatggacacaaaataatgcatgaatttttaattaaatatatgtgaaattgacctccgttggtgaagcatttgctttgctggcggagtttttttgatattctggaatgtggtttgtgattggagcagataattcaggtagagaattgcaatattgattgataaacggattataatatgttaatatttaggcaagtcggattgtgaaaataattgtttggattaattcaaagatacatagggtaaggagtaatgtactatgggtaaggttgggttaattcaagttgtaaaacgaagtccccttggggactgggatatttgatgggagagaggttgatgaggcctctcttgaagtgttgctattattaaatataaaattattgaaagagtaaaaaaattatatattaaatatgattatataaaaaggagaatttatggcttttaagacacgaaaaaaagaagagttttcatattcatcacctcaagagatgtatcaagataataaactaaaaaaaataatgggaccattagattatcaagcagtaatgctggataagtatatagaaaattatgatgaaaagacgttggcattagaattaccgacgggaagtggtaaaactttagtgggattattaataggcgaatacagaagacgtaaaaataaagaaaaggtggtgtttttatgtcctaccaatcaattagttaatcaagtggttgaacaatcaaatttaaaatatggattaaaagcaattgctttctgtggaaaacaaaaggaatattcgccaaaagataagagtagttttctaatggcagaagctattggggttacaacatatagttcgttttttgcattacattctttttttgaggatgtagatgtcataataatggatgatgtgcattcttgtgaagattatattatgtcaaattggactattcagattgatggtcaaggtacaacttttattgaaatagctgaattattaaaaccatttattagcgaaacagattataagtatttattagaggatgaatatattccagaagttgcatcatggtgtaatatgttgcctatgcctttaatattaaataaactagatgaacttcaatcaattttgcaacaaggcatagaaggtggttcttcaaattattatgcatatttgagaatgtctgaaaacttgaaagagtgtaatatatatattgcaaatagaaaaattcttatacgtccttggatagcaccaactatgtcctttaaaccatttgtagatgcaaaacaaagaatattgatgtctgcaacactaggaagaagtggtgaattagaaagaattacaggtattgaaaaaatctttcgtttgccaatagtaaatgattgggacaaaaaaggattgggaagaaaattttttgtttttccggatttatcattgggaaaagatgaacagtagaatataattgcagcacttcaaaatttgtgtaaaaaaagtgtctttctggttcccgattctcaatcggtagatgctattaaacaattttatgaagataatttaaacgacacaaaagtttttgatgcaaaggatatagaagaatctaaacaatcatttgtagatagccctgctgcaacagttattttagcaaatcgttttgatggtatagatttttctgatgatgagagtagattgctatttatttggaatttacctaaaacgactaatttacaggaaaagtttttaattactagaatgggagcttcaaaactatatgcagaaagaatacgaacgaggataattcaggctgtgggtagatgctcaagaaatcctagtgattattctattgtttgtgtaataggggatacaattcagaatgatttaactaaaaaggaaaaaattaagcaatttgcgccagaactgagagcagaaattcaatttggtttggaaaattctatggattattcaaatgtgaatgatgtgttggaacaagctgaagattttttgaatagaactgcagtgtggcaaagagcggaagaggatatagtacaattaagaaatgaatattggaacgaagaaaataatgcagaagagcagataaatcaaaagctacatcaatcggcaattcttgaattgaaatttcaatattcgttatggaaaaaagattataaatcagcatatgaatatgctaataatattgttcaaaatttaaatgcacctgcgctaaatggatataaatgtttttggaattatatgacgggatgtatggcgtattacttatttaaagatggacaagcagagtataagacatcaggcatacagtgtttatcggatgcagtaaaagaaaatatgggaataagatggttgcctggcttatcgggaaaattgttttttgctaaaagtgaagatgttaaagatacagattttttcgttgattgcattgaaaagatagaaagtatttttacattattgccaacattgcaaaaaacagagaaaaaaattgaaagtattttaagggatttaaattcgtccaatggaaatgaatttgaaagaggtcataaaggattaggagaattgttgggatttatctcagaaaatcctaatagtacaggtgcccctgatccatattggataattaatgaaaataatttagtcgtttcagaagataaaatttatgaggaaaaagaacaggtaaaaaaagtaccgatatctgatgttagcgaggctggaagacataaagcatggattgttgaacacgagaaaagaataacgaaaggcgctaatgtatatacaattctaattactaactcggatgggattgatgatgaggctcgtatatatgctgatgatatatattatgtgaatagaaaagaatatgttgactgggcagttaaagcacttacagtcattcgaagcgtatggaacacgttttcaggtgaaggggagagcgaatggagagaagcggttcacaaagaatttataatagcaggaataactcctaaagattatttgaattttgtatgtaataagaagcttaaagacatataaatatttgtcgcttattgttttatttggaacttggctgagttgcataaagttaaaatttgaaaccaaaggatttgttaaaaacattgagcttgatggaggcgctgtgatgaacagtctgattgtaacttatatgtgggttcagatggaatgtcctacgggtgtatgtggggttcgtagccagatgcttatatgaaatcaaacagacgagagaataataaaacgtaaataaacgaaaatacacctagagttttaacctctgaaccccaccaatagattattataaaaagtccgagacatatcccggactttttgtcgactagtgtatgatcttgtggctggcgaaccatttcgatgagtctttagattccagagccggtaatgagtccttatagggctagaacaaaccaccggttaagccgttggttctgattgttctttgggagattttatggctaaggtattgaagatttatgatgaacaaatagcacttttgaattgaaactaatattaaaaatctatgaaactctaataaattaataactaatttaatatttgatattcaatgtcagataagaagtcgggtttcagattcatgcatatctcattatttaaaggcacatgaatatattccattatggggcttaatattatattaacattaggaacaatcagcaatttttataaagttatgaatcaaaaagaaaaacaggagacatcaaaaatatttaaaatacaagataatgaacttgaaaatattttgatgaaatatatattgcaaagtaaacacaaaggagtcatatacgtctaaacaaaaagataaaaagatagttttttcggaagaaatagatagcagcattaatggtattgcattgggaacagcatttgttatgctatctatatttgttgtttattttaagatatttaatactacaatatagcagaaaaatttatagcagttattcttttgggattgggaatagctggaactttaactgaaatagggcggataaagaaggcagatatgaaagggctggatgatttaattgtagggttattattaacagttgtttctgttgttgttattttaaagtttcgaaatgtagcattaaatattggtttatttatagtactgttactaggttcgtatggaatgattagaggaatattagaaattctctattcattaaagcttcaaagaagaaagagtaataatgttaaaatagaaattatgaagattgttgtagctgtaactgaattcatttcattaatagttgtgattttacaacttgtaaaggaattagtatagataaacaagttaatctgtatttacaatttgtcaagaatttattatgaagatgctgaatatataaatactgatgatattgttttgttagagaggttctattttaaataaattattattttgagtacatgtaattaggaaaatgatgaatttttatattgaaaataaaaacacaaaatacgttgataaataaaaaaaacaatgatatattatatttgtatgagaaataaaaacgagtaatgtgtttataaatttggaggtagacatgaaacttcttcgtattacagcggaaggattgccgttatttaaagaaaaactggacttatcattttacgcacagcagagagtgtctgaagagcaaaagaatattctatatccattattttcaaatatttatgtaaattctgcaacaggctttattggcattaatgcgtctggaaagacctctgtcttaaaggttattttacttgcattggaaatactcaataatgagccaattaatcatattgaatctcgagatatattgggaaactcaagccagattaaattaaatatgtttttttattcaagtaatacaaaagaagtatgccgattggaaacaataattattgctcagaagaataaatcagaaggaataaggtatagcatcggttcagagtcattgtggacaaaatctgcggatgaggttattacccgtaaggcaatgcttaattttgaaggaagagagcctataatggttagaagcagccaggaggattttttatcagatgatgtaagtattatgattgcgaggaataaaaagactaaggataatatgcgtattgttaatcttctgaaatacacaaatgaaaacgttttgcggatttctgaagatattccagttgaagttatcacttttttggatccgacaattgaaaaattacactttgatgaaaatgacaataagatattaattcatttgcaattcagaggcaaagaggaaattcttttaaataatccggcagagcttaacaattatctttcatcaggcactgtgaaaggaatgattatttttacattggcaaaagaagtactacagagcggtggttatattgtagtggatgaagtagaaaatcattttaataaagaaattgtaacaacattgttgcgtttttttatggatagcaagctgaatagaaatggtggaactcttattttctctacacattatcctgaattattggatgaatacgagcgcaatgatggtatatttattaccagaaatagaaatggcattacagtagagaatctttcaaacatactgaaaagaaatgatatcaagaagagtgatgcataccagagtggatttcttgagggaacaactccgacatatgaggcttatatgcagttaaagaagagtattgcctcaacacttgggtag

SEQ ID NO: 17 - DNA, 7737 bp, unidentified
  source 1..7737: mol_type = unassigned DNA
  misc_difference 4228: note = a, c, g, or t
  misc_difference 4229: note = a, c, g, or t
  misc_difference 4230: note = a, c, g, or t
  misc_difference 4231: note = a, c, g, or t
  misc_difference 4232: note = a, c, g, or t
  misc_difference 4233: note = a, c, g, or t
  misc_difference 4234: note = a, c, g, or t
  misc_difference 4235: note = a, c, g, or t
  misc_difference 4236: note = a, c, g, or t
  misc_difference 4237: note = a, c, g, or t
atgataaacaaagatatgacgattatggaagcgctcgaacaaaacagagcttccgccactgtttttgcgggatacggcatgggttgcataggctgtcttgccgcgagcggcgaaacaatcgccgaagccgccgcccaccatggcatagacgtggacgagttggtgaacaagctcaacgaaacctgcaaataaggccggtttagttttttaacgcggaaaaagggcgaagcttccgcttcgcccttttgttaaattggttttcaatacgattcgttttttgatttaagcgcactttttttccaagccggcaacaaatttttccagtctgtccaaggccttgactatggtatccatgctcacgcagtagccgatacgcatatatccttccgcggagaagcacacgccgggtatgaccgcaaccttgcattccttgacaaggcgcgtgcaaaattccatgctgctcataccgaatttgcttatattgggcatgatgtaaaaggcgccttcgggcttaaccacgtcaagtccaattgccacgagtctgtcgtagcagtagtcgcgtctttttctgtattcctcgacaaagggtgcggggtcgaatctgagcgcttcgattgccgcatactgtataaaggtgtttgcgcacactgtcgtatactgatgcaccttgaacgcctgctcgatgaattccttgcttgccatcatgtagcccagtctccaccccgtcattgcgtaaggcttggaaaagctttggcaatacacgattttttctctcaaatcctgaaacctgacaaagcccggtctgcgctcgttgtaaaccagctggttgtagcattcgtcgcagatgacgaacatatcgcgttttttgacctgttcgtaaacattgaggagggacttttcgtcaagtattgtgcctgtggggttgttggggcttgtgagaatgattgctttggttttgtcggaaacgacggaggcaagagccttttccgttatctgaaagttgtcgggagcggtgttcaactcgacgtacctgcccttgcacagctcgatgacgggcttgtacatggaaaaggcgggcacgggaactatgacctcgtcgccctcgttgacaacggcaaagagcgcgctcattatggcttccgtgctgcccgtagttatcataatttcgttttcgtcgtaatccactccgttgaattttttctcgaaagcggaaatttccctgcgaagctccgccacgcccatagtgggcgcgtaaaaggttttgttgttttccaacgcgactccgcaggcgtccttaacctgctgaggggtgtggaaatccggctcgccgagagtgagaaacagctcggcgccctccttgtgcgccatatcgttgaaggcgcgcagcgggctgggttcgatacgtgtaacctgttcgttgaatttcatagattgttatctccttttctttgaattatatcatatacgcccgaaagcgcaggtgtaatttgtttgaaaaaaccttttccttttttgcggtttagcgaggcgttgtccttttcgttctgtgcgggaagggcattttgcggacaactcttctttttttgtttttctcggttgccaacgcgcctttgcggtgctataattgctgtcggagaaatttacatgatttacaatatgctcggaaaaaccaatcttgtcatatccgcggtgggcttgggcggaatccccttgcagcgcttagaccgggaaaaagcggtggaaacggtgcgttacgccttggagcgcggagtcaattttatcgacacggcgcgcggatatacggtcagcgaaagctacataggcgcggctcttgcgggcggactgcgcggggacgtggtgcttgccacaaaagcgccgccgacggaccgcgggggtatgctcaaagaaatggagggaagcttgaaagacctcggcacggattacattgatttgtatcaggtgcacaacgtgaaggattgcgcgtcgattgaccgtgtgttcggcgacgacggcgcatataaagcgtttctggaaatgaaagccgcgggcaaaataggccacttcggcgtgacaagccacaagcgcgaggtgctgacttatctgctggaaaactacgccgacaaaacagaaacaataatgtttccctacaatatcgtggaaacgcagggagaggagctgtttgcgctggcaagcagtctcaatgtggctgtcatagtgatgaagccgcttgccggcggagcaatcggggacgccgcgcttgcaatgcgtttcgcgttgtccaatccgcacgtgtcggtcgtcatacccggcatggcaaatcaaaaagaggtggacgaaaacacgtcgcagcccgccgagctttccgacgcggacagggaaaaatgcgcgttgcttgcgggcgagctgggttccgagttctgtcggagatgcagctattgcgcgccctgccccgcagggcttgacatacccaccattttcactttcgaggggtatctcaaacgctacaaccttgccgaatgggcaaaggacagatacatgaatctgaaaaaacgtgccaaagactgtcttggatgcggtgagtgcgaaaagagatgtccttacgagctgaaaatcagggagagacttaaaaacgtcgcacgtgagttcgaggacgccgaaaaggcgttttccgactccgaaaggagttgaaaatatggcgttgttcgagtgcaagctttattcccatgtactgcacgagccgtcgcaggtagccgtttacgcgccggaccgaaaaaacgctgggatgtccgactttaacgtcgtgcttttgctgcacgggatgtgctgcgacggaaaggattttttcatgcgcacgggcgtagccgcttatgccgacgctgcggacgccgtgcttattgcgccatcctgcggcaacaactatttcgccgacgggcagaacggacttaaatacgaaacgtatctgttccgcgagctgattccttttttgcaaaaaaccttttctttaaacacctcccgtgaaaaaaatttcattctcggcacgtctatgggagccttcgccgcggtgcggctggggctgacttatcccgacaggtttaaagccgtttgttctttgtccgcgccgttggacctgaaaaccgcggtggaaacgctgcgcgacaatatcagggactgccgccgccgcgctttttgctcggtctacggctcctgcgagcagttcggcggctcgtcggcggacatactgcatctgattgagcggactcctcccgcaacggctccgtttctttggctgtatgtggggagaaacgaccctcttttgcaaatcaataaacaaactgcggaaaaaatcagagaaaaaggctttgccctttcgcttgaaacggacgacggcgcccacgactgggcaagctgggacaggcaggcgaaaagatttttcgacttgtacgtgggaaaataatattccgtaatataacgagacttaaaaggacgcggaagcgtcctttttttgccgtatgcgtttgatgtcgaatttggacgaaaacgcgccaaatcgcttgacaaaccgccccgaaactctcataatggttgtaacgacaaagttttgccgccgcacaacaggggaaacaaaggaggagacaattgaaggagaatttatttgaagcggcgcgttccgacgagaagctcaggagcgctgcgtttgatacaagctgcgcaatggatgaaattttgtggaggctcaaggatttgagcctgattcacaacgacatttccgagctgataagcgtgggctgcggcttcggcgacgttgcgggcgaccttaaaaacgtctccgacaagacgcgcgacagaatacgcgaggctttcagatacagagagatgaacgacgcattgaaccgcgttttgggatacgagcttgagagggtgtgcgaaagcatagaaaatctgatttatcccgcgcccgacgcgcctgaggaataatattgcgtcccgctttgtcaaagcgggatatttttttgtcggcacgtctaaaacgattgacaaacccgattgaggctgataagataacacgcgaagaaacctatcgagagtgtcggagggacggacccgtcgatgacacagcaaccggacgaaatgtcgtcacaggtgctaaattccgcagggcgaggctctggaagataggacggcgtcaaaagctgtttcgtagatcggaagagcgtcgtgtagggaaagnnnnnnnnnnccccgcgctgtccgcggggttgttttgatttagaggttttaacaatcgcagacgaaggagaaaattaagggaatgacaggaaagagattttttacaagcgagagcgtgacggaggggcaccccgacaaaatgtgcgaccagatttccgacgcgattttggacgcgatactcaaagaggacaaaaacgcgcgcgttgcttgcgaaacgcttgcttacacggggggcgttgtggttgcgggagaaatcagcacccgctgctatgtggacataaagagcattgtccgcaataccgtcagagaaatcggctacacgcgcgccaaatacggatttgacggcaacacttgcagcgttttgacgtctattgacgagcagtctcccgacatcgcgctcggagtggacaaaagtctcgaaagcaaggaaggcttcggcggcgaggcggagcttggcgcgggagaccagggcatgatgttcggctatgcctgcgacgaaacacccgagcttatgcctgcggcgcacgtttacgccaatatgcttacaaagcgccttgccgaggctcgcaaaagcggggaaatagagctgttgcggcctgacggaaaagcgcaggtgactgtcgaatacgacggcgacaaggtcaaacgtatagataccgtcgtggtttcctcccagcacgcggcggaagcggatatggaaacgctgcgggaggaaattctcaaaaaggttattctcgccacgctgccggcggagctggttgaccgaaggacgaggtatttgataaaccctacgggaaaattcgtcataggcggacctatgggcgactcgggactgacgggcaggaaaataatagtcgacacctacggcggctattgcccgcacggcggcggcgcgttttcgggaaaggacccgacaaaggttgacagaagcgcggcttacatggcgcgttatatatgcaaaaacatcgtggctgcgggcgcggcgcgcagagttcagcttcaactgtcttacgccataggggtggcgagacccgtttcggtttgcgtggacaccttcggcacgggagccgttccggacgaaagcatgacggagctggtaaagcgcttgttcgaccttcgtccgcaggcaataatagaaaagctggatttgcaaaaacccgtgtacagacagattgcgagctacgggcatttcggcagggacggcatgacgtgggaaaatacggattcggcgcaaatgattgccgccgccgtcgaggaatataaatcgggcagatgacgttaaagggagcaataggcaacatagtttttttcaacgcggaaaacggctacaccgtttttcagttgatttccgacagcgacggcggggaaacgacctgcgtggggtatcttccgcagctcaacgtcggacagcaaatcgaggtttcgggcaaaatagttactcatcagaagttcggcgagcagttttccgtcgaaaaattttcccttgccgcgccgacaggctcggaggggcttgtcagatatcttgcaagcggactgataaagggtgtgggagaggctacggcgcgtcttatagtaaattcattcggcgacgacactctttccgtgctggaaaattctcccgaaaggcttgccgagctgcgcggaatcagtctgaaaaaagcgcgcgccataggagaggagttcaacgggcacagagccatgcaggagcagattatgtttctgcaaagctacgatattaccctcaacacggcaataaagatatatcgcgtttacaaggacaagacggaaagcgtattgaaaagcaatccttacaggcttatagacgacgtggacggaatcggctttttgtcggcggacagaatcgcaggcagcatgggcataggcaaggacagcgagttccgtctgcgcgcgggcatagtttattgtctcaaagacggggcggaaaagtcgggcaataccgttattgaggagcagactctcaaaaaatcggtgggcgagcttttggggtacgacgtgtccgaaagggcggagctttacgaggaaacggtagacaacctgatattcgaccttatggcgcgccgtttcgaggacggagagaaagcgggactggctcttacgaggtattacaatatagaaaaaaacattgcgggcgcgctggtcaggctggacgaggaggcgcccgccatttccgcgtcgtttaagacgctcatagaggattttcagtcggcgaacggagtcaagctgcactccaatcagcggcgggcggtggaggcggcgtttgaaaacggagtcacggtgataacgggcggaccgggcacgggcaaaaccacaatcgtcaggtgcgtttcgtatatttgcgacgctcttgacataaaggcggagtattgctgccctacgggacgcgcagcaaagaggttgggagcctcgacgggcaaaaacgcaaagaccatacatcgtctgctcggcatggaggcgagggaggacaggctggttttcgcttacgacgcctccaaccctctcgaagccgacctcgttgtggtggacgaagcgtccatggcggacgccgtcattttcaacagtcttttgaaggctttgcggcgcggctgccgtctggttcttgttggcgacaaggaccagcttccctccgtaggcgcgggaaacgtgcttgccgacgtaatcaagagccgtctgttttcagtaaacgagcttacccacatttacagacagtcggaggacagctatatagttaccaacgcgcacctgataaacagcggaaaaatgcccgtcatagaaaaggacagcaaggattttttctttatcgcgagggacaatcaggaggatatcctaaacgaggttacgggacttgtgacgacgcgtctgccgaagtttacttccctttctcccgcggagattcaggtgcttgcgccaatgaaaagcgggcttgcgggcgtcgccaacttaaaccgcacgctgcaagccaagttaaatccctttgagcgttcaaaaagcgaaatcaacgtcggaggcgtggttttccgcacgggagacaaggtcatgcagacggtcaacgactacaatatggagtgggaaatcaacgactcggagggcgtgaggtcgggcaagggcgttttcaacggcgacataggttatattacgcgaatagaccgcacagaaaatcttgctgaaattctgttcgacgacggcaggcgggcggtttacacctcggcggatatgcccgacctgactctcgcctacgcggttaccgtgcacaaaagtcaggggagcgagttcgacgcgctggtcgtggcggtgacaaacggaccgcccacgattttaaaccgcaatctgctttatacggcggtcacgcgcgcaaaaaaaaccgtggttttggtatgcagcaaaaggatgctgggaatgatggtcaaaaacaattatatcgaggagcgcgccaccatgctcaaagcgtttttgaaggaagaaaaacagaagcgctcggcgctttacctgtga

SEQ ID NO: 18 - DNA, 9508 bp, unidentified
  source 1..9508: mol_type = unassigned DNA
ttacttccgcattccaagacaatggttaataaactgctgtgcggttcttcctgatatgcctccgtggcttaattcccacttattagcctcagccataagttcttcttctgacatatcaagtccatttttcttggcaagtcctattacaatattataatattccttattagatggtttagaatagcttatctgacacccaaatctattaacaagcgacatcttttcttcaatcgtatctgatctgtgaagtccgttagaagattccatatcatttctgtcgttccatgtttctttgataagatgtcttctgttagatgtcgcatatataagaatattgtcaggcttagtttcaacgccaccctcaatgactgcctttaagaacttgtactcaatctcaaattcttcaaatgataaatcatccatatatataatgaacttgtagtttctgttcttaatggccgctattacatttgataaatccttaaactgatgcttatatatctctatcattcttaagccctggtcataatattcattaacgatagccttgatacttgtagacttaccagttccactgtcaccaaataaaagagcattattggcttttctgccctgaacaaagttctctgtattctcaacaagcttctttttttgtatctcatatccaataagatcatctaatacaaccttatccatattattaatagggttaaatgtaagctttccattctctgttgcagatattctgaacgccttgttaagtccgaacatacctacgccatatgctttatagaattctgtaactatatcaaagaattcatctgcattagcagctttggcaagcttttcgcttaatgcctgaaccttttcacttacatttttattatacatcagctccttcttaacgattgccttataatcagagattatagagaaacagtcaatgccgagttctttctctataaatgaaaaatcataatggaaaagattgtagaatactttaaagtcattctttgcaaatacattaacacttccgtcattagctcctaccttttcacaggtaatgctgaatggattctcattaataataagaaaatatgtaagataattctgccataaattcttatcgaaaccataatctgttgcaacttctaaaattctttttacctgagtatatatatctgtaaccagctcttcttttgatgataatttgttatcaaaacgattgaatatatctgccattgatgataaaatagaactgttatcgagatttccatacataattaattgagatatttctttatacattttagtattcctttcgccaatgtgtatatgtaacttttatataataacacatataatatcacattgagagcgaattttgtcactttttttagaaatattagttcgattaactattgacagctaacgaactaatgatataatctgtaaagaactttgcaaaagtttgtaaaagttttaacagacttttattttttaatgattagtgaggatttcaaatgaaaatcgtatcagatatcaacgcatttgtgtatattgtattgaccatcttctattgttatcagggaatatacgttattatcgcattgcttggtaaaaagaaaaaaaagaattacaacaccgaagctaagacacttcacaaatacgcatttattattgccgcacgtaatgaaaatgccgttatcggcaatttaattgacagtattaagaaccagaattatccttcagagcttattgatgttatcgtagtagctgataactgtactgataatactgcggagatttcaagacaacacggtgccattgtttatgagcgtttcaacaatatacttattggtaaaggctatgctatggactatgtctttaataagatatgtgaagaacgcggtgattacacttgttatgacggttatttcgtattcgatgcagataatattatcgatgtcaattacgtcagagagatgaacaaagtattcgacagtgggtacaaagttgtcacaagctatcgtaactctaagaattatgacactaactggattacagccggttattctttatggtttataagagaagctaaatatcttaacaacccacgaatgatgattaagacaagctgtgctgtatccggaactggctatcttgtagacagctctattatcaagaagaaccacggctggaaatgcaatcttttaacagaggatattgaatttactgtaactaatattcttgatggcgaaaaggttggttattgcgaagatgctatgttctatgatgaacagccaacaacatttaaacagtcttggaatcagcgtatgcgttggacaaaaggcttctatcaggtattatttaagtatggcagagacttattcaggacaatgttcaaggaaaagagaatgttcgtatcctgctatgatatgataatgacacttgcacctgctactttatttacacttggaacaatacttcttaatgtaataatattattatgtggtggtcttaatcctacattattcaagcagattgctggtccaactgttcaggctattttacttggtttctttaatttctatatgatgcttttagtaataggacttataactttaataactgagtggaagaagattcttgcacctgcaagaaagaagattatgtatcttttctcttttcctctctttatagctacatatattccaatctcaattgtagcgttatttaagaaggttgaatggaagccaattcctcatactgttgttaagactattgatgatttatcaatgacacagtataagcagtaattctattaagaatttaaactaaataatgatataaaaaaaggggctgtcgcactaagaaattagtgcggtgccccttcttttatgttaaggcggtatataatctaaaaaaataaatcccaggcttcgaaaaacctgggatttatagtaaaatattagtatgctattacataataaattacaaaaagattatactttaaatcagagtggatatcaactaaaacttccactcgaaaactgcaaaagagatatcaatttcatatttcttctagaagggcattctgcacctgaccatgcaacacttgcacgattcagaagcattcattttgccccttgttctaagcgtattctcgcagaagtttcaagattgaggcaaatgccaataaatatactttcgtgtggaaaaaagccgttacaaaaaatcaggcaaaactgttaattaagttagctgattttgtagctgaatgtgaacaactctatgacataaaaatagtttatggaaatgtagtaaaaatcaaacatttaaagagactacgcaaaaagctgtatgctctcaaaaatgctggaaatatcacattcgtgcatggtataggcaaaagaaaaacaccattacaaaaaagtattgaagcattagaagaagctctttctaaacttaaagaatacactcaataataaatagtaacttaaaaatcgtatttttataggaaaaagaggctggtaccctaacgattttcaatcgttaaagcgacagccccttatttgctttattctacaaacacaatcattacttttcattcctgtcaatctttaaatctttgtaatattgcattggagtaacaccatattctttcttaaatgctctaaaaaaatgattataccctccaaatccaccaagctcatatacctcatgaatacttttcccctgctctatataatggcggcataaatcaagtttgctctttacaatgtatgaatgaggtgtctcacctgtcaattttttaaactctcttactatatgataacggcttatataaaattcattttccaagcgctccaacgagatatcttctgtcaaatgttctctgatataaataaaaatatcatccattacaacgtgttttttcttcttcttcttgatctgtacatcatcctgaacagatgagcgaagtgcaagtacaagaatcatagttaataggcttttctcgtataatgagtgggcaaatttaggcggctcattattcatcgaatagagcttttttgatatattctttataagcatagccgattcagtctcagaatgaacaatcttaacttgatacggaacaaaatcaaacgcttcatcaagtcttgtttcttcatctgacaatttccttaaaagttctccacctatataaagaacataaacttcaagaggatacttatttttacgatattcaagctttactttattacctggcttaataaatatcaaatcctccatagtacatacaatattatcgtcctcctggtgcatataccctatcccaccagctataaatacaattgtatagctctccttttgcccaaagcttcgctgggcactatccaatattttcaaatattccattttgtagccttgctttttcatatgtctattttgtacactttcctattatattttttgttcatttcgtcaaaatatacaatatatcaatttttcgtagtttgcaagcaatatttgtatatggatatcagcataaccccaatataataagattgtagctactaaaacaatataaatgtttggaggtaaattatcatgaaagaaacaagacctttttccatgaaggacaaaattggttacactcttggcgatttgggatgttgctgtactgagcagttccgtgccatgtatcttgctattttttatacactggtattaaaagttaatccagtacacgtaggaatccttatgcttgttacaaagttttgggatgctataaatgaccctttaattggtgcacttgttgatagccacaaaaacaaaggaaaaggaaaatttattccttggattaaattctttgcttttccaactgcagtactctgtatattaggatttgttaacgtaagcaatttcgcttatggtgcacgtattgcttatatgttcattacatatattgtttacgaaattatgtacacatgtgtcaacgttccatttggtagtctttcaagtgtaatgactgatgatgttaaccaacgtactgacctttctcgtttcagaagtcttggcggtacaatttttatgacagttatcgttattgctggaccattattcttatataaagataaccagccagtacctagccatttccttattatgtcagcaatctgtgcagttattggattaatctgtcttatgtttacatctcattggtgtaaagagcgtattattacagaaccagttgttgagaaaaaagaaaagtttaactacttccaggtaattaaagatattactaaaaacaaagcattactcggagttatgttatcaagctttatcggtattgttggagcaggtatggttaacggattaaatacttatttattccgagattattttggaaatgttgccatcatggcagtttcaggtatgttaagtgtactctggtcacttattgcattcgtaggcacaaaatttgttgctaagaaatttggaaagaaagaatggatcatgtacagtgcaactttctcagttgttgtttatgctattttattcttcttcccacttgaaaatcctttgctctttattatcatcaacggaatctgctatcttggagtaagtggtttccaagtattagtttgggcacttgtaaatgatgcaattgattatcaagaacttcagacaggaaaacgtaatgaaggaattgtatattcggcatatacattcttccgtaaacttgctaatgctgtatcaggaagtatgagtagttttgcacttgcaattgctggattccaggttaatgaagctgtccagaatgaagcattctcaggacatctttggaaaacatatacaggtttatatgttgtaggatatttattagctgttctggtattaaaatttatctaccctcttacaaaagagaaaacagctgaaatgttacaggatttagctgacaagcgaaatgctactactgcagaataaaattagaaatggaggtattttaaattgacaaaacaagtagaaatcacaaaccgtgatggacacatcttacgcggaatagttaacattccagaagatggcacaagatttcctgctattgtaaatgtacatggctttacagggaataaaagcggttacaaaagtatttatacgcacacagccagattattagctgaacatggatttgccagtgtccgttttgatttatacggaaatggtgaaagtgatggtgaattcgaggacatgacctttacaggtatcctacacgatatcgaggatattataaactggactaaaacacaagattttgccaatccagataagattatcttatctggtcagagtatgggaggatacgcagctgctactgccgctcctattgttaatccttatgctctcatacttatgtgtccaggtgctggaatgtggtttggatgtaaggatcgtgctgaagccatggaagctaaggggatcaccaaggccgatattgaaggactcactttcccaacatcttttaatcatgatttatttaattatgagccattctcgtcagcagaaggatacaacggaccagtcctccttataagaggaactgcagatgatttggtagatgatgcaacatgccatagatatgagtcactttacaatggaaaatgcaattataaaacaattgaaggcgctaaccacaattttgccagtgcttttgcaagagcagaattagacaaattaatgttagagtttttaacaccacttaaatagtatattcaatttgaaaggaagtatgaacaatgaaattattagagtctataaaagttggaaatattgagtttaaaaaccgtattatgttcccaccacttacaacaggatatgaggaaaaagatggttcaattggagaacaaagttttcgtttttacgagcgtctcgcaaaaggcggtgtcggatatatagtaattggagatgttgcaccacttccaacattctctcctacaccaaagctttattcacctgagcaggttcaaagcttcaaaagacttgctgacgcatgtcatgaaaatggcgcaaaacttggaattcagttattccatcctgactacaatgttaaagctttaaacgatttgtttcatcagggcaaaatgcaggaagcaagagctaaacttcaccatgatatgcagcactttgtaaatgaagttactgcagaagaacttgatgaaataataaagcatatggaaaactgtgctatcttagcacacgaagctggtgttgattgtattgaagtacatggagaccgtcttgttggttctctttgctctcctattttaaatcatagaactgatgaatatggcggtgacctggctaatcgtacacgttttgcattaacacttgtaaaaagattaaaaacaatcgtacctgacatggttatcgactacaagcttcctatagttactcctcttggagaaaatagttttagaggaaaaggtggtcttccacttgatgaagcttgcatttttgctaaagaattagaagcttgcggtgttgacacattacatgttgcacaggctaaccatactggaaatatgggtgatacaatccctgccatgggaacacagccatacggatttatggtttcttattctaaaaaaatcaaagagcttgtatctattcctgtatctgtagtaggccgtatcgttacaccagaagctgccgaagcagttattgcaaatggttctgctgatattattggattaggtcgttctcttctcacagaccctgactttgcaaacaaatgtgcagatggacattgctgtaatgtcagaacatgtatgatgtgtaataaaggatgtacagataatattcagaatcgtgctttcttaagttgtgtacttaatgctgaaaatggttacgaaggatctcgtcagattactcctgcagcatcaacaaagaatatagcaattattggtgctggtattgctggacttgaagctgcacgtgtttccgcattaagaggacatcatgtaactatatttgagaaatcacttcagattggtggtcagttacttattgctagtgtacctccaagaaaagaagaaatgatgagaagcattaattattatacaaatgtacttcctgaattggatgtaacattcaggcttggtcaggaattcacatcccaagattataattcattcgatgaagtaattgtggcaacaggagcaaacaatgcaataatccctgttcctggcaaagatcttccaactgtagcaagtgcatgggatgtacttgccaagaaagaaatcgtattcggtaatgtttctgtaatcggtggtggtcttgtaggtgttgaaaccgctgaatatctggcttcacgcggatgtaaggttacaattattgaaatgatggatcagattgcaaaagaagaaagtaacactattttacctactctaatgagggaattagagcattataatgttcaaatagtaacatctgcaaaattatcagaaattaaagatgattctgtagttgttgaaaaaacagtagacgacaatacatcaacagaagaaattgcttcagactttgttgtaatggctgttggtgcaagaaagaaccttccagagctttctgattgtcctcttccacttcactatattggtgattgtgctggagaacgtccaagtaatattgagcatgctattaaatcagcatatgatgtagcatgtgaaatataaattattaattaccctattaccacaaaggggctgtcgcactaagaaattagtgcgatgcccctttttttatgttaaggtggtatataatctaaaaaaaataaatcccaggcttcgaaaatcctgggatttatggtaaaatattagtatgctattacataataaattacaaaaagattatacgttaaatcagagtggatatcaactaaaacttccactcaaattagaaacaattattcctaagaatgattctgtgcggttactcagtcagtttgtagaggagatggatttgactgatctatataagagatatcaatttcatgtttcttttagaaggacattctgcacctgaccatgcaacacttgcacgattcaggagcattcattttgccccttgttctaagcgtattctcgcagaagtttcaaatatcctttttgatttaggtgaaatatctggtgaaactatctttattgatggtaccaagattgaggcaaatgccaataaatatactttcgtgtggaaaaaagccgttacaaaaaatcaggcaaaactgttaattaagttagctgattttgtagctgaatgtgaacaactctatgacataaaaatagtttatggaaatgtagtaaaaatcaaacatttaaagagactacgcaaaaagctgtatgctctcaaaaatgctgaacataacttaaaattcaaatataagaacataactgcggatgctggttatgagagcgaggaaaactatctgtttcttgaagctaataatcag

SEQ ID NO: 19 - DNA, 5211 bp, unidentified
  source 1..5211: mol_type = unassigned DNA
ttattctctccgcgtaaggcggagggcagacagctttcccgccgccatcagcagcaccggcaggacgtaagcgacgtactgcgccacgccgccgtagacgatcagcaggttgtaggtggcgtgaaaggtgatggccgcgcccagcagaccgcaggtgccagcgatcttcagccacgtccgctgccaggcatacgccagcccttcgccggcgatgccgccgcacagcacatgcatggctcctgttccgaaaccgcggaagaagatgaaggagaagcggtccgctccgttctggatcagatagcagacattttcaaaggtggcgaaggcaagggcaatcgtgatggcggcagccttgattttatccccctccggctcgaataccagaagatagaataccagcggcagcagcttcatgatttcctccaccaccggcgcgatctccgccgtggcggcaagggcgtccgcctgacataccgccgcgaggaaggtgttgatataggccgaaagcaggcacacccccatcccggcaatgcagaacaggaagaagcggagctgccgccttcccaggcacaaagcggccaccagcagcggggatgccatgcacagaaagatgttttcgatgtaggtcatgcgtccaccgcctttctcgcggcgggcagcagcccgaaaatggcaagcgtcagcagcatatcacaccagaaggttgggcttgccggagaagtatccggccagaagcagcccaccgtccagagcaggtactccgaggcaacaaagcacagcacgccgatgtggaagtaccgcatcttccgcgccgcgcccgtctgcccgttggcgcagaccagtccgcgaatggagcagaaggagagccatatcatcatgccgcaccagagcaggttggagagaatgtccccgaaggtgcagtagaacgccagcagcggcacgccgaacgcaggcgcaagccatgctctgcggcagcggaagcagcgctcctctgttcctgccagcgtggcctgcaagatccgcaggaagataaggcttgccacccagccgaactccgacacataaaagacccggggtgtggtgtcgaacagcagcaggtacagcgtccagtagagcgcgccgagggcaaagcagccgtagaagcaaagcagcagaaaatacgcctgcctgcggcttctgcggtaggatagacccgaaagcagtgcgccggcgaacgtgaccagcagctgcagcaggttctcaatcagctccatgaattccctcgctttcgttgttctgatcgtcctcccgcttcatctgatgcagccggaagcacagaacggtcacgcacacgccgagaagaaacgccaaaagcccgatgacgatatatccgagagcgccgccgccatacatgctggccgccgtttcaaagccggagtagtcgccggtctggatgcttgcggcaatgccgggcatggcgagggacgcgccaatgagcagcacaaggcacgccgccacagcggaagccatggtaatcttattgcgccgcagccgtttctcccgctcaattttggcgatgcgccgctttgtctccgcgacccgttcctcatgactccgcatttgtgattccctcccgttccagcagccttcgcaggctctcttttccgcgatacaccatgttggtgatctgctttaccgttttccccgtgacctccgccgcctgcgcgtagctcatatcttcaaaataggtgagatataaaacctcccggtagtccgggttcatttcacccatgcagaaatgcaggacgcggtttcgctccgccgtccggataacctcctccgccagcagccgcccgtccggctcgttggtcagcgcgtcgaggctgaacaagggcttccgcctactcttgcgccgcagcgccgtgtggcgcgcggccttatagagatacgccttgaagccgccgtcccgtatcttcggttttttcgtgaacagataggcgaaaacatccagcatcagctcctccgcctcgtgaacgtcgtgcagatagccgtcaatatacagggtcagggggtcgccgtattttttcatcagggcctccagccccgcgtcgtcgccgcttagatattggcggtaaaaaacctcgtcacaggtcataacgttccctttcctttgcagccgttcaggatgcagggcagcctgtcagacgcttgcacagccgtgccgcccctccataccgataaaaaaatacaacacaatttcagtatatacgaatctcggaagaaaagcaagagggcaagcggagcgataaaaagcagcacacccggagaaataacccggatgtgctgcagaaggccgaaacacagagcagctcagcagcgggcgccgctgatcgtggggcgccggatgagatgaggcagcgccttgcccgcttccttctgtgcaatgagccatgcggccatatcccgcagggtctgctccagcgggcgcggctgatatgcaaagcacttcgatgcagccgcatggctgaagcagccgtttgaggcaagaacggaaatggaatatggggtgaaaaacaatggctttcgatccttcaagctccggcgctcgtagtacggagcggccagccttgcaagacccagaggcaagcagatgggccgataccgccgttttgccgccgccccgatgatctgcagcattctgcgaatcgtgacatagtggccggacaaaatgtagcctttaccgggctctccgctttcggaacaggcgagaatgccatttgccacatcccgcacatccacaaagtcatatccgccgcgaacggcgaaaggcagcttcccggcaagaaaggatcttgccattgaggtgaagctccctccctgtaaatcatccggcccgatgatgccggaggggaatacaatgctggcgttcaacccgcacgccgctgcgtcgtagaccagctcggtggcagcggccttgctcttggcgtaatcaccgtccacaagccccggcgagaattcacagttttctgtaatggggcagccctttggctgctccgggatggcatgaacggagctgacatagaccagcttgcccactttatgcgccatgcattgctgcaggagctgccctgtcccacctacattgacctgatagagcctcggaccgggtctggacgcgacggagacgataccggcgcagtgaatcacacaggtacggctgtcggcatccgcaaagaagtctgccagcgagtttttggcgcacacatcaccgataacggtatggacttctttggggagcaaattgatataggggtcattctgcagcacaagcgcgtacacttgcgctctgcggcgcaccagcctctccgcaacagccctaccgaggaagccggtagcacctgtaacaagatatttatcatacattcaaaagacctcctctcaagataatcatacaggtgttgattatctttcacaagtatagtatactggagaggcagatcagaaacaatcggcatttgccctgcaattgaaagaaaagcaacacgtcgtgccggagtgttgcagaattttgtaaactttttgtgaggagcgcaaaatggagaagctggatgcaagaaaacgctatacgcaaatggtgctcaagcagtcctttttggagctgctgaaggaaaagccggtcagcaggattacggtgaaggaggtctgcgcgctggcgcagcttaaccgtgccaccttctatgcccattacagcgattgcttcgccctgatggagagcattgagaatgaactcatcgatgcatttgagaaatcccttcgctatgtcaattcctttgatgtgacggcgctgatcgaggccatctatgatatggtcgatcagaatcaggaggcctgccgggtgctgatcctgggcaacacaagctcgaccgtcctgatgcggatgatcgccttggccaaggaggacagcattgcttactggcggaaagaactgcccaatgccagcgaaacagagcttgagatgatgtatacccatctgtcaaacggtttgatgcatgtcgttgtggagggctatgacaagtacagcaaagaggaaatgatccattttgtcagccgggtcgtaaaagccagtctttcggtgttccgatcgtcccaaaaacctcttgcttaacatagatattatgtctgcgtggtataataagctttgcaaaaggattgacggtcaaagaaaggatgcagcagatcatgaaatcagttcggcagatcatgttggctatctgtgttatttttatcgcttccgcattcgcgggctgcggtgtggacgctgatttgccggagaagcgtccggcattggaaaaaattgagtacacaaatctcaacgacagcgtatcgcagaagcttttggaagatatgctttccggcgccggggtgtcggaagaccgtattcagggcttcttcaaccgtgtagacagtttcaatgaaagcatgagggaagaatggctgacggctggctttgagcaggcaaaactgctggacacaaaatatgactcatatgagatgcaggatgagtgggtgaagatgaatgggagctttcccggatataactgcaggataaccgcaatggagctgtttggtgatttcgtgtccgcaggaaataaagcacccgtggatacgggcgaagatgtgctgttcatggacgaggaaacactgaagaccagcccggatgcgctgggtggaagcagtctgaccgattttcgcgccctgtattcctccatgagggcggaagacaccgcggatgttctacatcatgttcaggctgtgcaggaggaatggagatccaggggtatttcgttccgggagaatgaaagaatacgcctcattactgtgttcttccacgacaagtctaccgaggaggaatccatcctgtttgtcgggcatgttggggtgcttctgacggcggacgatgggacactttattttgtggaaaaggtggcctttcaggagccgtaccggctgctgcattttgctgatcgtacggaactgagcgattatctcatgggcaagtacgatgtctcatggggacagagcacggcacacccgtttattatggagaacgatgaacttatggatggctggcgtccaaacccggacggtgccgacgcggggcttcattcagaaaacatcctgcataccattggtagatggggctgcctcaaaatgcgaattgcaagaaaatag

SEQ ID NO: 20 - DNA, 7525 bp, unidentified
  source 1..7525: mol_type = unassigned DNA
atgaagggaaaacatagaattattgtatcaacaaagcgcttaaaatatgattttgaaattcgaagaaatctgacggtcatccggggagacagcgcaactggaaaaaccacattggtagatatgattcgggaatacgtaaacaatccatccgggacccctgtggaactgacgtgtgacaaaaaatgttatgtgctcgaaggctcactgtggaaagaacagttatcagcaatgcaggatagtattgtatttattgatgagggaaacgaatttatcaagacagtagaattcgcagatactattcagaaaacagataattattatgtcattatttccagggaatccttgccttctttgccgtatagcgtggaggaaatctatggaattcgtacttcaggaaaatacggaacattaaaaccgtgttatcatgagttttacagaatatatggagcacagactttagagaaggatatcaaaccagaggttgtaataacggaagacagtaattccggttatcagttttttaattctgtatgtaggcaacagcaattgaaatgtgagacaatgaatggaaagtcaaatgttttccattatttaaatatgcataaaaatgaacgcatacttgtaattgcagacggtgcggcatttggttctgaaattgacagagtgatgcagttgatgggtggaaaagatcaagtggtgctttatttgccggagtcatttgaatggctgatattaaaggcaaaagtagtaaaaagcaaatgggcagatcaggtgctggaaaagccgtgggaatatgtggaaagcaaaacatattttagctgggagcggttttttacggcagttttgattgaagagacaaatggttcttaccttgcatatgcaaaaagaaaattaaatccagcatatctgaacgattctgtcaaagattccatactggaacagatgacaaaaattaaattgttttagggaaaaagtgtgataaaatagcagaagatgtgattttttctgcaaaggagtaagagacaatgttaaaaggaaaatgtgtggtactcggtgtgaccggaagtatcgctgcctataaaatcgcctatctggcaagtgcgctcgtcaagcagcatgcggatgtgcatgtgatcatgacggaaaatgcaaccaattttattaatcctatcacgtttgagacgctcacaagcaacaagtgtctggtcgatacgtttgaccggaatttccagttcaatgtcgagcatgtggcactggcaaaacgggcggatatttttatggtagcaccggcttctgccaatgtgatcggcaagatggcaaacggaatcgcagatgatatgctgacaacaacgattcttgcggcaaaatgcccgaagtatgtttcccctgccatgaataccaatatgtttgaaaatccgatcgtacaggataacatcaaaaagctcggggactatgggtttcatatcattgatccggcgagcggttatcttgcctgcggggataccggagccgggaaaatgccggaaccggaaacactgttttcttatattatgaaagatcttgcctgcgaaaaggacatggtcggaaagaaagtgatggtcacagcaggaccgacacaggagaagattgatcccgtgcgttatattacgaatcactctaccggaaaaatgggctatgcaattgcggaaaactgtatgcgccgtggcgcggaagtgacgctgatcacgggaccggtggcaatcactccgccgccgtttgtaaaggtcgttccggttgtatctgccgcggatatggcagcagccgtaaaggagacagcagagcaacaggatattattatcaaagcggcagctgtggcggattatcgtccggatcacccggtcgatgagaaagtcaagaaaaaagacgggaatgccactcttacgatggaacgcacggaagatatcctttcgtatctgggcgcgcacaaaaaaccgggacagtttctgtgtggattttccatggagacggaacatatgctggagaattcccgtgcaaaacttgcaaaaaagaatgcagatatgattgtggcgaataacctgaaggtagccggagccggatttggtacagataccaatgtggtgacgctgattacggcagatgactgcagggaactggaaataatgagcaaagcggatgtcgcatcagcgattgtgagtgaaattttaaagaaaatgtgttagtattaaaatatgacagacttagaagcctattataataaatttaatgaagagaagcgtctggacagccgacacggcagggtggaatttgtgacaagcatgcattatatccatcagtgtctggatgaaattgtgaaagaacgtgcaaaagaggaaatccatatccttgatatcggggcgggaaccggacgatacagcgtaccgctggcacaggaagggttcgatgtgacggccgtggaactggtaaagcataatctgggacgcctgaaacagaagggtgcaggagtgcatgcatatcagggaaatgcaatgaatctgaaaaaattttccgatgattcctttgacgtaaccctgttgtttgggccgatgtatcacctgcatgaggaaaaggacaagcttgctgcgctgcgggaggcggtgagggtgaccagacccggaggcaggattctcgtggcgtatattatgaatgaattttccgttatcacgtatgcgtttaaggaaaaacatattctggaggcgcttcaggagggaatgctcacagaggattatcactgtacttcaaaagccaatcctctgtattccatggttcgtctggaagatattgaagcattggaccggcaggtagaggtcaggcgccggcagatcatagcggcagacggtgcagcaaattatatgcgtccgtttttaaatgcgctgacggaagaagagtttgatgcgtttctgcagtatcatctggcaacctgtgaacggatggatcttatgggtgcaagcggtcacacggtggatattcttgtgaaagaggagtctgaaaacgtatgaaaaaatggatattgccaatcctaatggcaggatttttgctgacgggatgttcttctcctgcagcaacgtcatcggctttgccctcttctacggaaaaaatcacggagacacagatgacggaagaaccgggtacgctggaagaaacggaaaccgggactgcaactgaaacgcagcaggaaccggtgatacagacggtaaaaattacggcgacaggtgactgtacgcttggggcaacacagacgcatgggtatgcaggttcctttcatgaatactatgataaatacgggcaggattatttttttaaaaatgtcagaagtatttttgagcaggatgattttacactgctcaatctggaatgtgtgttgtcaaatgcgaccgagcgtgtggaaaaaacgtggaacttaaaaggaaaaccggagtatgttggtattatgacagacagttctgtggagggggcaagtctgggaaataatcatacgtttgattatgggcagcagggacttgatgataccagggaagtgttaaataaagcagggattatcttcggattcaatgatcatgtggatacctataccacgaaggatggtatcaaaatcggaattgtctccgcaagccagttgtctgcagatgaaaaacatgccaattatatccgggatgggattgcagaacttcgggaagaaggagcggatctggtaattgcctgttgccactgggggatagagggggatcattatccgaatgattatcagcagaagctggcacaccaggtgattgactggggagcagatctgctggtcggtacacatcctcatgtattgcagggaatggaattatacaacggaaaaatgatctgctacagtcttggaaatttctgctttggggggaacaggaatccaaaagacaaagatacggcgatctatgaacagacctttacctttgtggatggggtactgcagacagatatatcagccgatatgataccatgcagcatttcttccacatcagaaagaaataattttcagcctgccatagcaaaaggcgacagaaaacagacgattattgatcatatgaatgagtattcggaaaagtacagtaaaatcggatttgacgcaaatggcagggtaatcatcagggaagagtagggggataatataattttatgtggcaagtaaataataatgataagaggaatcagcacatgaatgcaagtttttggaattatccgtcaaaacagaaaagctggccgatagacgaagaaatggaaagtctcggggaagtcattcatccactcgataatatcggtggatttgatgtacgtccgggattttatcagatgaatggtgcatatcagacagaggaaggggtaagttttacggtaagctcccatggtgccacgagttgtgtcctgctgttattccggccggcggcacaggaaccgtatgcaagaatccgcattccggaaagttataaaattggaaatacgtattctatccttgtttttggcttaaaagcagaggattttgagtatgcctatcagatggacggtcctgccgatcaggcgagagggttactgtttaacagaaaacatacgcttcttgatccatatgcgaaagctgttaccggtcagagaaactggggagaaaaaccggaaggcggaaaggattttgtctataaagcccgtgtggtgcaaagtgattttgactgggggcggtatcggaatctgaattacaaatttgaagatctggtgatctatgagatgcatgtcaggggatttaccaaagatgcgtcctccggtgtaaaaggtgggggaacatttgaaggtttgcgacagaaaattccgtatctgaaagatctgggaatcaatgcggtagaactcatgccgatttttgaatttgatgaaatggaaagtgcccgtgtggtggatggcgtgcagttgtacaattactggggctataatacggtttccttttttgccccgaatacaagttatgcatttcatcaggagcataatcatgagggtgatgaattaaagcgtctgatccgcgaactgaaagaaaatggaattgaagtcattcttgatgtggtattcaaccatacggcagagggaaatgaaaacggtccatgtttttgctttaaggggattgataacaatatttattatatgcttacaccggatggatattattacaatttcagcggctgtggcaatgtcttaaactgcaaccatccggtggtacggaggtttattacggactgtctgcggcactgggcagtagagtaccgggtggatggattccggtttgatctggcatcgattctgggaagagatcagaatggtgcaccgatggagaatccgccgattctggaagcccttgcatttgactctattctgggggatatgaagttgatcgcagaagcctgggatgcgggtggcttgtatcaggttggaagtttcccgtcctggaaccgctgggccgaatggaacggaagataccgtgatgatatgagaagctttttaaagggcgacagtggcgtagcagggcgtgcaattacacgtatcaccggatcctccgacatgtatgatccggcaagccgcggatatagtgcatccgtcaattttctgacctgtcatgatgggttcacgttgtatgatctgtattcatataatgaaaagcataatgagaaaaacggatggaacaatacggacggggataacaacggcatgagctggaactgtggggcagagggtgagacggatgatccggcggttatgggcctgcggcgcaggcttgtaaaaaatgcatttgccgcgttgttatgcagccgtggaccggctatgttttttgcaggggatgaattttgtaatacgcagtatggaaataacaacgcatactgccaggataatattatttcctggctggactggaacagactggaagaatttcaggagattcatgattttgcccgttttatgatccatttccgtgcaaagcatccgattctgcgaagggatacaaagccggcagtctgcgggttaccttccgtaagtatccataatggagagccgaaccggaattatacggactataatacacatttaattggaatcatgtatgcgggaagaaatgccgatgatacggatgatgatatgatcttttacggaatgaatgcgtattgggagcctttggagatgcgcctgccttcgttgccggagtcttatcattggaaacttgtagtaaatactttctgtgaataccaggatggggcagattttgaagcccagacacagggagatcagacacgtgtgcgtgttccggaacgttctacggtaattttactggcagaacatgatttataaaaaagagttgagcaccgctctggaaacagggcgtgctcaactctttttttcggtggtatcgggtctggttgtaatttcactggttccgatgaggtaatctgcagaaacattcagaatctgcacgatggctgcaagatccgcaacggtcggagaacgacgaccggtacggtatccgctgatcgtggacggcgaaacaaacattgcatttgccagctggatattggaaatattttgtttatacataatcagactcagacggtcaccaaaatctttgtatttatttttatcattcgttttcatacaaatgattttatagaaagttgatataaaaaacagagaaaacgcgtattgcgttttaattcttaaataaatggaaaaagatttccaaagagataagaaattaaatccatccaccgtctaaggtgagaatctgtccattcaggtaactgcttgctgtggcaagagaatatgccagtgaagcaacttcttccggggatcccatacggccggcaggaatttcttcgatgagtgcagagcgttcttcctcggagaaacaacggttcatatccgtatcgattaccccacaggcgatggcatttacctggatattgctgggggcaagttctttgcccaaagcgcgtgtaagggaattgatcccgcctttgcatgcagaataggcaacttcgcaggaagctccgacatttccccatacagaagaaatattgatgatatgtccggatttggcatgaaccatggaggggatgacctgtctgcaggtggaaaagacggatgtgaggtttgtcgcaataatccggttccagtcggtaatatccatgtcggtgagcagaccgatataagagatgccggcattgttgattaacacatcaatctggccgaaggtatccagtgttttttgcaccatgtcacagataaaagtatagtctcctacatcaccacggaagcaaagcacctgtatggagtaggttgtttcaagttttgtggcaagtgcctgcagcgtttcataagagttatggcagcaaagagccagatgatagccttcagcggcaaatcgacatgccagggctgcaccgattcctcgggatgcacctgtaatcaaagcagtatgtttcat

SEQ ID NO: 21 - DNA, 7692 bp, unidentified
  source 1..7692: mol_type = unassigned DNA
ttatatttttccccataatttttccagcatctcatctactgctgcttcaactcgctcatctgcatcatctctcaatgacaatgctagagaaagttcatctaccttatcttcttttgataataaatgtggattatatctccacatttcaactgccatttgattttctgaatcaaataaattatttgtcataacatccttccaacgcgaaatactatctattgcaaaacatttgatttgtggaacatttagcattgtataatgagctaatgcgaaatatccgctttctaacaattcagaagtcacacaagttttaggtatatatacagttttttttactggattaagtaatttctgctgagttctctcaaataactctttgggtgagctatcagaatgtataattttctgcttacctgttttcatagtctgtattaatcctaatttttcaagctgacgagaagcccttgaaatagatgtaggtgtgaatccaagttcttttgctacctgactcgttgttatttcaacagtcccattatatataaagtacaacaacagaacctgagctgaaggaagtatttcctcattaggaaatgtttctgcattgcaacgttcctgtaaatataacgccataaaaggcagatatatctgtttattatttacaacaaatggaatcttctcccgaagcaaatattccttctgacgatatgtgatttcgtccagaatcataacaacaggtaaattcactatgctttttatctttgaaatatgtttttttaatgtttcaatctgctctagttccgttttaggatatataaaaacagctttttgtctatctaatagtacattacgcagaacatatcttgttccaataaaattgggtatatgtttaatgtcatcatttatataggtcagtttcaatcctagaactttttggagatattccatatatatgcctccattcataacttattttatgtattataacttaaataaagttataatacaatatttgagttataattttaaatgtttaaaaaaattattactgatattggggattttacaatatagatgtgaacagcgtaaggttttagatttccttattgaaccagtaacagatgataaaccacagttgcatgatgtatatttagttaaatctggatcaactgtaggaaaggtagcaattgttgaaaccacagaaagattcaatatatggtcgccattaaacacctaatactgaaactattttcacattttctttatctattagtgacaatattgaataactatttgaaataagctatttgtcgatttatgcctgtatctcaccatcaaatatcatattccagctcatacggatatcatacatcagccttgtaagtgcaatactatcttccggtgtataaatagcactggcactatttcctgatgctatacatctgcctgcttcacgaatctcatattcaaatccatttatatcaaccgggcactcgattgtttccggttctttaccatccacctcaagtatcaaggtctttgcgtgttggaaatccggcaaaaatatacttccctttgttccctcaattctggcattacgttttaattcctctcctattgtctggactgattctgcaatacatccatcattatatgtcagtttgagacaactgtaatcatctgttccattctcattaatatgtacttttgtagtttctacattctgcggatcacaccctgtaacaatacgtaaaaatcccagattgtaaattcctatatccaacagagcacctccaccaagtgcagagttaaatttacgctcttttctggcacccgttgcaacaaatccatactgacaggaaatatgtttaatttctcctattgttccctgaagcaggatattacgcagacgattatacaatggcagaaaccatatccataatccctccataataaaaagatgcttatcctttgccagcctgtacagttcctgtgcctgtttctcatttattgtaaatggtttttcacaaagtacatgcttaccatgctcaagacaaagtctgcaattctcataatgcaaactattcggtgttgctacataaacagcctcaacatcaggatcatttaccaatgcttcataagaatcataatatcgtggaatgtcatgctccctggcaaaagcttttgcactatccatgtgccgtgagcctactgctgcaagctgttcattttccttactcatctgatttatagttgatgcaaattttcttgcaatattacctgtagccagaattccccacttcatatcattttcctcctaataatataattgcatttcacattcatatcttgttaataattatacactattttaccgcatacaccaacacaaaatagcaagtcaaatttcatattatttactgtcacaactatcgtacgcttcattattgttatataaaattcttatattaatcaaaatttttcaacacaatctaaaaaaagctgccacacatcattcttagtgcggcagcccctttgtggtaatagggtaattaataatttatatttcacatgctacatcatatgctgatttaatagcatgatcaatattacttggacgttctccagcacaatcaccaatatagtgaagtggaagaggacaatcagaaagctctggaaggttctttcttgcaccaacagccattacaacaaagtctgaagcaatttcttctgttgatgtattgtcgtctattgttttttcaacaactacagaatcatctttgatttctgataattttgcagatgttactatttgaacattataatgctctaattccctcattagagtaggtaaaatagtgttactttcttcttttgcaatctgatccatcatttcaataattgtaaccttacatccgcgtgaagccagatattcagcggtttcaacacctacaagaccaccaccgattacagaaacattaccgaatacgatttctttcttggcaagtacatcccatgcacttgctacagttggaagatctttgccaggaacagggattattgcattgtttgctcctgttgccacaattacttcatcgaatgaattataatcctgtgatgtgaattcctgaccaagcctgaaagtaacatccaattcaggaagtacatttgtataataattaatgcttctcatcatttcttcttttcttggaggtacactagcaataagtaactgaccaccaatctgaagtgatttctcaaatatagttacatgatgtcctcttaatgcggaaacacgtgcagcttcaagtccagcaataccagcaccaataattgctatattctttgttgatgctgcaggagtaatctgacgggatccttcgtaaccattttcagcattaagtacacaacttaagaaagcacgattctgaatattatctgtacatcctttattacacatcatacatgttctgacattacagcaatgtccatctgcacatttgtttgcaaagtcagggtctgtgagaagagaacgacctaatccaataatatcagcagaaccatttgtaataactgcttcagcagcttctggtgtaacgatacggcctactacagatacaggaatagatacaaactctttgatttttttagaataagaaaccataaatccgtatggctgtgttcccatggcagggattgtatcacccatatttccagtatggttagcctgtgcaacatgtaatgtgtcaacaccgcaagcttctaattctttagcaaaaatgcaagcttcatcaagtggaagaccaccttttcctctaaaactattttctccaagaggagtaactataggaagcttgtagtcgataaccatgtcaggtacgattgtttttaatctttttacgagtgttaatgcaaaacgtgtacgattagccaggtcaccgccatattcatcagttctatgatttaaaataggagagcaaagagaaccaacaagacggtctccatgtacttcaatacaatcaacaccagcttcgtgtgctaagatagcacagttttccatatgctttattatttcatcaagctcttctgcagtaacttcatttacaaagtgctgcatatcatggtgaagtttagctcttgcctcctgcattttgccctgatggaacaagtcgtttaaagctttaacattgtagtcaggatggaataactgaattccaagttttgcgccattttcatgacatgcgtcagcaagtcttttgaagctttgaacctgttcagatgaataaagctttggtgtaggagagaatgttggaagtggtgcaacatctccaattactatatatccgacaccgccttttgcgagacgctcgtaaaaacgaaaactttgttctccaattgaaccatctttttcctcatatcctgttgtaagtggtgggaacataatacggtttttaaactcaatatttccaacttttataggctctaataatttcattgttcatacttcctttcaaattgagtatactatttaagtggtgttaaaaactctaacattaatttgtctaattctgctcttgcaaaagcactggcaaaattgtgattagcgccttcaattgttttataattgcattttccattgtaaagtgactcatatctatggcatgttgcatcatctaccaaatcatctgcagttcctcttataaggaggactggtccgttgtatccttctgctgacgagaatggctcataattaaataaatcatgattaaaagatgttgggaaagtgagtccttcaatatcggccttggtgatccccttagcttccatggcttcagcacgatccttacatccaaaccacattccagcacctggacacataagtatgagagcataaggattaacaataggagcggcagtagcagctgcgtatcctcccatactctgaccagataagataatcttatctggattggcaaaatcttgtgttttagtccagtttataatatcctcgatatcgtgtaggatacctgtaaaggtcatgtcctcgaattcaccatcactttcaccatttccgtataaatcaaaacggacactggcaaatccatgttcagctaataatctggctgtgtgcgtataaatacttttgtaaccgcttttattccctgtaaagccatgtacatttacaatagcaggaaatcttgtgccatcttctggaatgttaactattccgcgtaagatgtgtccatcacggtttgtgatttctacttgttttgtcaatttaaaatacctccatttctaattttattctgcagttgtagcatttcgcttgtcagctaaatcctgtaacatttcagctgttttctcttttgtaagagggtagataaattttaataccagaacagctaataaatatcctacaacatataaacctgtatatgttttccaaagatgtcctgagaatgcttcattctggacagcttcattaacctggaatccagcaattgcaagtgcaaaactactcatacttcctgatacagcattagcaagtttacggaagaatgtatatgccgaatatacaattccttcattacgttttcctgtctgaagttcttgataatcaattgcatcatttacaagtgcccaaactaatacttggaaaccacttactccaagatagcagattccgttgatgataataaagagaataggattttcaattgggaagaagaataaaatagcataaacaacaactgagaaagttgcactgtacataatccattctttctttccaaatttcttagcaacaaattttgtgcctacgaatgcaataagtgaccagagtacacttaacatacctgaaactgccatgatggcaacatttccaaaataatcgcggaataaataagtatttaatccgttaaccatacctgctccaacaataccgataaagcttgataacataactccgagtaatgctttgtttttagtaatatctttaattacctggaagtagttaagcttttcttttttctcaacaactggctctgtaataatacgctctttacaccaatgagatgtaaacataagacagattaatccaataactgcacagattgctgacataataaggaaatggctaggtactggctggttatctttatataagaataatggtccagcaataacgataactgtcataaaaattgtaccgccaagacttctgaaacgagaaaggtcagtacgttggttaacatcatcagtcattacacttgaaagactaccaaatggaacgttgacacatgtgtacataatttcgtaaacaatatatgtaatgaacatataagcaatacgtgcaccataagcgaaattgtatacgttaacaaatcctaatatacagagtactgcagttggaaaagcaaagaatttaatccaaggaataaattttccttttcctttgtttttgtggctatcaacaagtgcaccaattaaagggtcatttatagcatcccaaaactttgtaacaagcataaggattcctacgtgtactggattaacttttaataccagtgtataaaaaatagcaagatacatggcacggaactgctcagtacagcaacatcccaaatcgccaagagtgtaaccaattttgtccttcatggaaaaaggtcttgtttctttcatgataatttacctccaaacatttatattgttttagtagctacaatcttattatattgtggttatgctgatatccatatacaaatattgcttgcaaactacgaaaaattgatatattgtatattttgacgaaatgaacaaaaaatataataggaaagtgtacaaaatagacatatgaaaaagcaaggctacaaaatggaatatttgaaaatattggatagtgcccagcgaagctttgggcaaaaggagagctatacaattgtatttatagctggtgggatagggtatatgcaccaggaggacgataatattgtatgtactatggaggatttgatatttattaagccaggtaataaagtaaagcttgaatatcgtaaaaataagtatcctcttgaagtttatgttctttatataggtggagaacttttaaggaaattgtcagatgaagaaacaagacttgatgaagcgtttgattttgttccgtatcaagttaagattgttcattctgagactgaatcggctatgcttataaagaatatatcaaaaaagctctattcgatgaataatgagccgcctaaatttgcccactcattatacgagaaaagcctattaactatgattcttgtacttgcacttcgctcatctgttcaggaggatgtacagattaagacgaataagaaaaaacacgttgtaatggatgatatttttatttatatcagagaacatttgacagaagatatctcgttggagcgcttggaaaatgaattttatataagccgttatcatatagtaagagagtttaaaaaattgacaggtgagacacctcattcatacattgtaaagagcaaacttgatttatgccgccattatatagagcaggggaaaagtattcatgaggtatatgagcttggtggatttggagggtataatcatttttttagagcatttaagaaagaatatggtgttactccaatgcaatattacaaagatttaaagattgacaggaatgaaaagtaa

SEQ ID NO: 22 - DNA, 6400 bp, unidentified
  source 1..6400: mol_type = unassigned DNA
tcaatcttcgatcaatccttttttcttccatgctccgctccgccagcgcaacatcatgccgaccgcacggctgcattcatctgctgtcagaccgatataagcacccactactgccagatgcagttgtatccccagcagatacgttcctcccgctgcacacaaaaacatgaaaatagctccgaggatcaccggaaatacagcatctccactggttttcagtgcatttccgtataccaaatttgttactcgtccggcttccagggcaatatcaataaacatcagcttctgcactagttctaccatactcttatcctgcgtgaaaaaagagatcaggaccggggcactgactgcaaacagaaattctgttcccatcgccagtaccgctccgatcgccgcagattttttagtctgcttatcacatatttcatattttcccgcacccatgtaccatccggtcataatggcattcgcctgggcaagtgcacttcccacacagaaggataaattcgtgatctgtgccgtataggagcgggcagccacattgattccttctgtatccatctggttcagaaaacggatcaccagtgtcatcgctacattataaataatattctccaaagcggaaggtaatccgatccggatgatcttccgcaaaatctctccggaatttaccctctccgaatatttttttgcagggatcagccgccgtacaaagatcactatcaatatcagattcactactttagagatcactgttgcggatgcaaccccctgcacgccgaggtggaatcgaaacagaaacacggcatttaatataaagttcaaaatattacctgtcacagttgcgatcagaggctgtttcgtatatccaaatgcacgcagatatcctgccaatatgggaatcatagcgttcagtatacttccgcctccgacgatccgcaggtattgtacggcaggctccttcaatgccggtgcaatacctaccacatacagaatcccatcggaacagaaaaacaaaaacacagacattacaacacccaggatcccattaaaccataatcccaaagtctttgcctgacaggcgatccccggtctgcccgcaccgatattctgtgtcatcacagccagcattcccatagaaactaccgaatacataataatgaatacaccgatataagtatttgctgttccgactgctccgactgcctgatctcccacagaagaaagcattaaggtatccaccattccggacaacatgtaaaagatcgtctccagacacagtggtacaaataattgaaataatgacttattctgtccttccatcgtaggttttatatcctttctgcggttcctaaaaatttgcattttcattttacaactattcagaatactattccgaatagtctcttcaatttttacatattactactttatctttcctaaaacttgcatttttaccacagaaaattgacttatttctacttttatagtaatctgaccataatatcctctgctccactccacagaaaggcctgcctatgtaccctgaattaagagaagaacgcattcacggaacaaaagaatttccttttagctgttatcacctgcatgatatgcctgctttttttcagattcctgtccactggcatccggaggtcgagatcatatatgtccgctccggctctcttaatgtcatcattgaaggggaagaatacgaagcggccggcggctccgtattctttgtgaatcccggtgagcttcattttatgggttccgcaattccgggcgtagactatcataccctgctgtttccactggaatttatttcctttcagacggacgatctgttggaaacggagtttctccttcccctgcgtaaccatgaattgcttttgcatcataatctttcccacgaaaaaagctgtcctgacatcatttctctcatccgtgagatcctgtctgtcagacagcttccaaatacattgaacgggcatttccgattacgtattttattgttgtcacttatccaaaaaattgcttcctgcggaaccattaacccaatgggctccaaaaggaacgatccgatgcagcgtgagatactgacttatctgcagtataactacacggaaccccttcgattggaaaccctggcagagcaatttcatttatccgaaaaatatttgtcccgctattttaagcagcattttcatctgactctgacgcaatacctgatgcatctgaggctgacccatgcctgccatctgttagagagcacctctctgccggttacagaggttgccctgcagtccggcttccccaacgtgagtcattttatccgctgctttcacaggacatatcagatatctccgctgcaatatcgcaaacaactgccctatcaatgatcgttttcaagagctcttctggcaagctccaggcatcccatgataccctgatcatcgtggagagatgccggcaccacataatgctccatgtctgcaagttcatccgttacgatatagccattgatgtattccttaagtttcttgcggatgagggggaataactgctcctgatgcatgacaccaccgcctaaaatgatcatttccggagataccgtcatgacatagccggtcagtgcctgagcaatgtaatctgcctccagctcccatacttccgggcaatctgccaggtccactgctttcctgccccagcgttcttcgatggcagggcctgctgccagaccttccagacaattcttatgataaggacatcttccggcataagtatctgcggtccgcttcgtgatcaacacatgtcctgtctccggatggagcattccgtgatgcaactctccattactataaataccaccgccgacacccgtaccgatggtcagatacatgacgcactttttcccttgtgcctgtccgaaagttacttcgccgaggacggaaccattcacatccgtatcaaatcccacggggcaatgaagtgcctcctgcatctgccccacaatatcgcagtccctccaggccagctttggcgtggttgtgatataaccgtatttttcggaacctctgtccagctcaatgggtccaaaacaggcaattcccaatgcatcgatccccttgtccctaaaataagcgatcatcttaggaatcgtctccttaggcgtagttgtaggaatcgatacctgttcataaattgtaccgttctcatccccaatagcgcagaccatttttgtaccgccggcttccaatgcacccagacgtaattttgccatataaactccctgcctttccagattctgtctgtcaaatatatcccgagcttttccttcggattctgctctctgtggttagtatagcaaatccttttctccctgttaatatcaatttttatagagtttctctctctttttaattttctcttttccggggaatctttcctatgatatacttgttatactgttctcagttacacacaaattgcaggaggttatatcacaatgaaaaaaatatggatcgtcggttccctcggtcacatggggcaggcgttgatcaggttgttagacatgatggaatatgaattatacgaaaccgataaggacgagctggatatcacggatgaacatgcagtttccctgttcatgcaccgcaatcgtcccgatgtcgtcatcaactgtgcaggatatcatccttccgccggtgcagcgcagtcggagacagatatggcttacaaggtaaacgccgtaggtgcgaggaatctggcgcagtctgcggagagcattcaggcaaaactcatacagatctctacggatgatgtattttccagcgcatccgacacaccctataatgagttcgatgatgtaaatcccgtaggactgtttgcaaaatccaaatacgccggagagaaattcgtcatccagctgatgacccgctatgtcattatccgcagttcctggatctatggcatcggcaaagactttttgaatgaagtactcgaagctgccgtggaccctcaggtatccacaatggaattgctaaataacgaccgtgcggtacctacctccgctgcagagcttgcacgcgtggtaaaatttttcatcgacaacgaccattacggtatctatcacgccgtatgcagcggcggttcctgcacacgcctggaattcgcgaaagagatcctgcgtcttgccggaaaagaggaccggcttaccgtcacagtaaaagacggcaccccggagaaatattccgtactggataatatgatgctgcgtcttaccggcatcgaagaacccagtggctggagagagacactggcttcctacatgaaagaaaccggaggactggaatagtggaaaaacacaaagaagaaaagaaaaaactcggtttgtccaccaaaatctttatcgcccttttaaccggtgcggtatgtggtgtgctgattcattattatatgccggaagggtactttagagatacgattctgatcaacggtattctctatgtactgggcaacggttttatccgcctgatgcagatgctggtggttcctctggtattctgctccctggtctgcggtgccatggccatcggtgacacgaaaacgttgggaactgtgggtgtgaaaacgatcctgttctatctatgcaccactgctttggcgatctgcgtggcactgggtattgccagtctgatcaatcccggcgttggcttaaatattgcgttgccggaggatgccaccgaagtcgcgaccacccaggtagattttgcggagacgttgttgaatattattccgaaaaatatttttacctctctgtccgccggagatatgctgccgatcatcttctttgctttatttgtcggcattcttctggctgccatgggcaaccgggtctccactgtggcgaactttttcagtcagttcaatgacattatgatggaaatgacgattgcagtcatgaaagcagcccctgtcggtgtcttctgcctgattgccaagaccttcgcaggtatcggcttcgacgcttttgtgcctatgctgaaatatatgggaagcgtcattctggcactggcggtacagtgtttcgtggtatatcaggtcatgctgtttgtgttcacccggttgaatccttttaagttcattaaaaagttcttcccagttatgacctttgcgttctccacttccaccagtaatgcgacgatccctctgtctatcgacactctgtataaaaaaatcggtgtctccaaacagatttcgtcctttacgattcctctgggtgccaccattaacatggacggtacttccattatgcagggcgtagcagttgttttcatagcacaggcttacagtattcctctgaccccggctgccattgctactgtcattgccaccgcgacgatcgcctccatcggtactgccggtgtccccagtgtcggtctggtcaccctgtccatggtactgacctccgtgggactgcctaccgaaggcattgcactgatcatgggtatcgaccgtatcctggatatgctgcgtaccgctgtcaatatcaccggtgatgccatatgtaccactatcgtggctaagcagcagggtgcctttaatgagaatactttccgggcagataactgatcacctgtttacagctttccagatggctgtcaccgtataaaaaaagagtgaaacattctgtcttgtgctcaagtgcaccgtcagaagtttcacttttttatagctcgcagctattctatttcagtttattgagttttgcccggttggcaataacgatcagccgcatatcctgtgtcagaggttcttccggatcgatattggtatttacattttttccttcgatgatcgccaccacgttaatggaatattttttccgcagattcagctcgatcaggttcttcccgatccactgctgtttgacttccatttccaccatagacacatcctgggacaattcgataatgtccatgaaaccggagcttaacagatttttggccaggtggatccctgactcactctcggggaatactacacggtctgctcctactttcgtaaggatcttgcagtttatctcagtggcgcatttggcgataacggtctttacgcccagttctttacacagcatggttgccataacactggcttccagatgatttgccatggtcacaatgaccacatcaatattcgcaataccgatctgtctcaacgcttccggatctgtaacatctgcacatttacagtagggaatctctgagattgccgcattgacaactgcctctctattgtctaccgccaccacctctgcgccgttctctgccaactccttcgccacacttcttccatatcttccaagtccaaatactgcataggtctgattgattcccat

SEQ ID NO: 23 - DNA, 18205 bp, unidentified
  source 1..18205: mol_type = unassigned DNA
tcagattttggcgagtgcctgttccagatcggctatcaggtcattgatatgttccgttccgatggataaacgtacagtgccggggtaaatctcctgttctgcaagttcctgcgcattaagttgcgagtgtgtggtacttgccggatggatgaccagtgatttcacgtcagctacattggccagcaacgagaaaatctccagactgtcgatgaagcggtgtgcttcttcctgtcctccttttacttcaaacgtaaagatggagcctgcaccattcgggaaatagcgttgatagagtgcatgatccggatgatcggagagtgacggatgattgactttcttcaccttctgatgattattcaggaagttcaccacttttagcgcattttctacatgacgttctacacgcaaagaaagcgtttccagcccttgcagcaggatgaaggcattgaacggactgatcgttgctcccgtatcccgtagcaaagtggcacgaatgcgggtgacgtaagcagccggaccggcagcgtctacaaagcgtactccgtggtaactcggatcgggctctgtcaactgtgggaatttgcccgaagctacccagtcgaattttccggaatcaacgattactcctcccaaggaactgccatgaccgccaatgaatttggtggcggagtgtaccacaatgtctgctccgtgttcgatggggcggattaagtagggagtaccgaacgtattgtctataatcaaaggtattttgtggcggtgagcaatttcggacaccgcttctatgtcgataatattggaattcgggtttccgagtgtttcgataaatacggctttggtgttctcctgaatcgctttttcaaagttggaaaggtcgctcggatcgacgaaagtggtggtaacgccataattgggcaaagtatgtgccagtaagttatagcttcctccgtaaatcgttttggcagcaacgatgtggtcgcctgcacgagtaatgttttcgaaagcgtatgtaatggcggcggcaccggaggcaactgccagacctgctacgcctccttcgaggacggctacacgttcttcaaaaactccttgggtggagttggtcaggcggccgtagatattgcccggatcttgcaagccgaaacgtgcggctgcatgagctgaattgtggaatacataagaagtggtctgataaataggtactgcgcgtgcgtctgttgccggatctgcttgttcctgtcctacatgaacctgtaatgtctcaaagtgtaaattctttctttccataatcgtatgctttttaagtttaatattctctctttattttcttgcaaagttatgggatgtagatatatcgaacaatatatagtgaaaatatagaaaataatgctatttttgtatcgttatacagaataaggcaactgctttattcttaaaaatcacctgttagaagaatatttttcttatggatacttttgagaaattagataaagtggatttgcagatactccgtactttgcaagagaatgcgcggttgacgaccaaagagttggctgcgcgggtcagtctttcatcgactcctgttttcgagcgccttaaacgtttggagagtgggggatatataaagaagtatatcgctgtgctggatgccgaaaaactgaatcagggttttgtggtcttttgtagtgtcaagttaaggcggctgaacagggacattgcggctgagtttacccgaatcatacaggacattcccgaagtgaccgaatgctataatatatcgggcagttacgattacttgctgaagatccatgctcctaatatgaaatattatcaggagttcattctgaatgtgttgggaaccatcgatagcctgggctcgctggaaagtacgtttgtgatggcggaagtgaagcaccgatatggaatacatatttagtgggaggattgatgtatttcctattttggctactctttgttttcggctcaggtttccggtggattgcctataatgtctctgtataagctgccgtcatggtccttgtattttgcgtattggtagaggcggaccagtatatcactgtaatcaagaatggctgtatttgatttctgtgataaattggtgcccaggataccactgcctatgataccggggttgtataatacggcgtcttgtctgatagagttcattatcagttctgcacaaatatagtctttaatccttgcctcttctagtcgggtcgtgatgtatgagttcagatggcttttgtcatgttgagtcataaagccgtaccatagtaaacatttcatccctaattgggtagcttctattaatatatccagataggttagtcccgatgttcctttcttatctatctcataaggatcgatatgaatgaaagaatctttggggagtgatggcagtaacctcatgaccccttcgagagaatcagtattatataggtggacggatgtctgtagttccgcttgcttcgcatagcgttctacattatccaaagcactcttttctatatcgaagtatagaaatttttgggcctgtcttcctaatacttccattgctaaagccggggaacctaaatagtatcctctttgcatttctgcactttctatcttatagtaaatggaatcctttaaaacttgattgtcttcctctgctgctttttctaagaaatagtaaatgccatattgttgttccgaagtctgctgcatcggatagaaagcgcaggctgaatttgtttctacatagatttgtggatgctcgttccgaagaacttcgcaaagtatcagatgtttcagtacatcaggctgtttgccgtaatgagtataagttgccatgatactaaaggtttatagtgatgatataaatggtatacagcaaatatacgggataattcttagattcttgcatctgatttccaaaattatcctgtacatttgttatgtgatatgaaccttattctttgaacgcaatgaaatggcaacattgtaaatagcttcgctctatatggatgatggacaatggtgaaatctgttgttcaagtcttttgtggctaaacaggtcacccgatattttattattttatttcagaaactatataaagaagcaataacaatgaatacaaatatttatccgcgcaccaatgaccttcagaccgtctatctgaatgcagttatcaataatcctcatataaaggttggtgactacaccatatacaatgattttgtgaatgatcctgttcagtttgaaaagaacaatgttttatatcattatcctgtcaatggagaccggctgatcatagggaaattctgttcgatagcctgtggagctaagtttcttttcaatagtgcgaatcatacgttaaattctttatcgaattatccgtttcctatattttttgaggagtggcagttggataagggaaatatcacttcggcatgggataataaaggggatatagtgattggaaacgatgtatggattggttatgaggctgttgtcatggcgggcgtacatatcggcgatggagcgattattgcatcgagggcggtagtcaccaaagatgtacctccttatacgatagtaggcgggacgcctgcgaataaaatccggctgcgttttgacgaagatacgattgcgcaattgcaggaattgaaatggtgggactggagtactgataagatagctcattatttgcctcatatcatgaatggggatatggaggaacttatgaaataaaaagtatcatagcgacatagaatggaagctccaataggatctatgaaacatagattttattggagcttcctttttataatctttcttttaaatacttattgatacatctccggtcccaatttatccctcgcttgacaattttggccggaatgcctgcaatgattacattcggctcattaaattcttttgttacaatacttccccaaccaacgatactgttgtccgctatcttcacattcttgccaatcttgctatctttccctatccatacatgcttgccgatttctatgctcttggcaaaattgatcggttcaccctttaaatctgttattgtatgtgcatcggtacaccatatatcaattccccagcttaactgactgtcatctccaatgctaacatacgagtcatcttcctgcaaatacaatgtaaccccattgattacaacgcggtttccgatatctatccggcaattgttggctgttcttgaaacaccggcacccagtcccggcagctgcccgatgatcagcttcaatcccgtcatgcctaatatggtagaatatcgtaagatgatcgttcctatatttacgatattattatccccttttacgatcaaaagaaatccgttgctgagcagcaattcctccgcactctcttcagtgtcgaaatacattgagatatgattgttatttcctgtgattgtaatgttagcctgattaataatcttattgaatttatcatttggagaagaaacgcaatcaattctgttgtgtgggaatattaatgtaaattcattgttctgtccgataatctgttccatatcattaatacttgtgggttatatccgtatctttttgatacgacttttatttcattcctcaaatgtacgaaaaagaataaactaaaactcattcgatagtcctttttcttagcttgtgttctcgtggcgatttctaaaggctttctatactatatttattaacttcgttgcctgatatttattcgtgccactatagtggtacgcaagaggaactatagttccctttgtgttctattatagtagtccgcaagggaaactatagtggtacgaactaattataggactaaaaatataaatatcagggaaggaaccggttagttattcgggcttttttcataatgcttttaaccggttatcggattctgataatgagcgttataaaacaagtttttcggtttaaattctgttttttcattcgaatgataatacatgatcaacttgtttccgatagtgtgtattatgcaggatgatgatataaaggtaattattagaattgatttcttatttattatatatagctttgtaactttaaaaaacagagaaggtatatttgaaataaaagttttacaacaaataatagtgtatacaaaataaatatcgggagaatcactatgtacagaataatcatcttattaatttcattgatactatcagtacaatgtttttcacaaacggagtttactacttgtctgtttgacatatccagaaacagagtgataccgatagcgatttatcagccgcagaaagtaaattcaaaaacgaaggttatcatattcagccacggctatgatgggaataaaaacagtaagtcgaaccaaacctattcctacctgacacgttttctttcacaaaaaggtttttatgtgattagtatacaacatgaattgtccgatgatcctcttttagcgatggaaggcgatttcatgcagacccgtatgccgaattgggaacgaggaaccgacaatatactttttaccattcaggaatttaaaaaattgaaaccacaattgaattggagcgaactcatcttgatggggcattctaatggaggggatatgacaatgctgtttgccactaagtacccgcagttgatcagtaaggctatatctatggatcatcgcagaatgatcatgcccagaacgttgaagccacgtctgtatacattaagaggatgtgactatgaggcagatgcgggagttctgcctaccggacaggagcaggaacaattcagaatgaaagtagtgaaactggatggagttacacatagcaatatgggtgagaatggaacggcggaacagcatgacctcatcaatcagcatatctgcaaatttctgacggaaagataactaaagcatcatttctattttatctggcagttttaaaccgaaagcctgtttttcttgtaactttgcagccgattttagaaaaagaagtttggaatgaacaataaatacgaagaacggctgggaacagaacgtatgttaccgcttgttttcaaaatggcacttccggcagtggctgcacaattcgtcaatctgctttatagcattgtcgaccgtatatacatcgggcatattccgggaattggcaccgatgcgctggcgggtgtaggggtgactacctctctcattatactgatttcttctttttcggcaattgtcggcggcggtggtgctccgctggctgccattgcactcggacagggcgaccgtgtacgagccggaaagatattgggaaacgggtttgttctgctgatattgtttactttgctgacttctgttatcgcatatacttttatggaacctattctcctctttacaggagcttcggaaaacaccttggaatatgcggttgactatctttccatttatctcttgggaacgatatttgtcgaaatatccacagggttgaatagctttatcaatgcccagggacgtcctgccattgccatgttttcagttctgatcggagccttattgaacatcattcttgatcctatttttattttctggtttgacatgggcgtgaaaggtgccgctttggctacggtactttcccaagcgtgcagtgcggtgtgggtggtaagtttccttttttcccgacgtgcctctctgcctttggagaaacgatatatgggactggaccggaaaattatcctttccatattagctttaggagtatcccctttcattatggcaagtacggagagtttggttgggtttgtcctcaatagcagtctgaaggagttcggagatatctacatcagcgcattgacgattctgcaaagttcgatgcagtttgccagtgtaccgttgaccggatttgcgcaaggattcgtgccgattataagttataacttcgggcatggtgacaagcagcgtgtgaaagattgcttccgtattgtactggtaaccatgttttccttcaacttgatattgatgcttttcatgattcttttcccttcgacggttgcgtctgctttcaccagtgatgaaagactgatagaaaccgtacgttggacaatgcccgttttcttgggtggtatgaccatcttcggcttgcaacgtgcctgtcagaatatgttcgttgcattggggcaggcccgaatctctatcttcattgctctgttgcgtaaagctatcctgttgattccgctggcgttaattttgccgaaatttatgggagtaacaggagtgtatgctgctgaggctatatctgacgcgactgcggccatctgctgtacgctgttgttcttttggcagttccctaaaattttgggaaagattaaagagaatactttgcgtgtggagtaatcgtttctttataattagttttttacttcacagatatgcccagcattacggttgtattctgactgttattccagaccgaatgaggtatttctccttttaccagaaaagcttcattttcattaataatcttttcttccttgtcaagcagaactttggcttgcccgctgatcactataaataaatgattgtgtgggtgagtatgcagcttgacaggttcgccgccgttcggttctaaataggctattgcgccgtctattatttcaccacagttgccaaaaagttttttggctaagaacttcaagtgttccggtggggtgataaatccatctgattcattcatgactatacaaatatatattgttatttatcgtgtatgacacaactacaaaagtagttatttgaattgattttcttttaagtatgatgtcttaattcctgatttgtctccatctgagataatcttttgaaccatcagttgtatttctttggtcgagttttttagatatccgtcgaacatagcttgcattgcctcatctctaaatatcttttttacgatcggaacgctgataaacagcggtaagtagtatagcttgtttactttttctttctttgggttaatattcatttgggagcagacgtaaaagccctctctgatggactttattgttgttttgatgattttcgtattactgataaaagatttcattgttccgccggctttgatgatgcctgctgagatgcctgttatgaatgcataatgtgggataagccaattcataatctgattggaaataaatggcttcatacccgcatccgacattgcatctgctattttttgtattcggggtgtcgtttcgcctgttgtctctcccaacattgttttcgaatatttagatccggaaatgacagcgttaatgcctttttcattccgccctcctcctgccataaaaggaaaaccaaagaaatattgtccggacataaggcattgacttattttttttaagtcatcctgccatatattttggaaaaagagaatatgtgcctttcctgatgattttttaagaacaggcagtatttcttcaagatgaaaactatgggtagtaacaataatatattcaaaatcattatccaccgaaagagtatctgtcactttcgggcgaaaaatgatgttttctgttattttcttgtcattcctgaagtctgtacaatagatatttattccattttcttcaaaaccttgtttttgattgtttctgacaaggatacttatgtcgtgtcctgctttcgccagttgccagccgtatgtgctaccaattactcctgctccataaattagaatcttcatgatgaaatgtatatttattatttgtaagaaagatcgatgaaagctgaacgaaatagtccgtgatagtctgagtaggtcggttcacaaacatcgataaggtcggcgggtgaaaatccggagaagttttttacttcttttatcagatgtgatttgtcataatagccacattcgtatgctaattgttctagtgtcatatccgtatgtgtctgtagcagataatgtaatttctgaaaacgcataatccgcaggaaatctttcggattggttccgatatgttccgcgaataaacgtttgaattgtttataactcaaacaggaaatttcggctaagcggtcaatgttgctttcccctctatgaatagagtttattactgcatttattcgtttgtcttcgtaattgtcggattgtgatatacaaagaagaaggaagtgctcgataagacggacgcattgtaaatcgtctgttgcatcgttcagctgttgttcgagttcaagtaattcaggattgttcagtatatcaagcgggagataactgttatttgtttcatgaagcggagttttaaagaatgccttaatgcctgttggctgaaaaacaatgcagatgaaatcaatatatcctgaaaaggcaagattcgtatagtcagttgcgataccgtaaagatatgactggggaagataatctccattggatgatgaataaatacgatttccccgatgaaaacataatgctgtacaacctagcggaacaagacgctgggagcaaagtgtaacattttccattgcaaggaaccagtactgctttacatacggagtaagtgatgcagagggctgtatgactttaaacttattcatttccggcaaagttagagatattgttgtatatataaggtgtaaaaaaaggacgttgttgaagcttgaatggaataaaaatgtgtaaccgattacgtatttcttgagaaatagttgcatgtattactgaaatccgatatatttgcgtaatcaattacgtatttaataatgcaagtaataaagacatggacttttttaatcagacggggaaattagctatcggaagcagactacgtatgctgaccgataaaatcacggtagatgcggctgcaatctacaaaatgttcggtgtggacttgaaacccaagtggtttcctgtcttctttgttttatcacgtggagaggcaaagacaattacgtctattgctaaagagataggacactcgcatccttcggtgagcaatatcataaaagaaatggtaactaagggattggtgaaagagacgaaagataaatccgacgggagaaggaatatggtaatgttgtctgccaaaggaaaaagaatgtccgactcttttgcggagcaatgtatagatgttacgtccgctatcgagcaaataacgcagcaaacccggaacgatctttggaaggcgattgaagaatgggagaagcttctgtcggataagtctttgctggagcgggtgaaggatgcgaagcaggagcgtgaagctaaggatatccaaatagtatcttatgaaccatgctatcaatctgctttccggacacttaacgaggagtggattactgcttattttcgaatggaagaggctgactacaaggctttggatcatccgcaagaatacattttggataagggcggagacattttggtagccctttacaagggtgaaccggtcggagtatgtgctttgtgtaagatggatcatccggtctacgattatgagttggccaaactcgccgtcagtcccaaagtacagggcaaaggtatcggagtgttgctttgtgaagctgtcgtgaataaggcaaaagagttgggcggcaaaagaatctttatagagagcaatacacgtttgaaacctgctatccatatctatcacaagctgggattcagggaacttcccgaataccacacgacttacgaaagaggagatatacaaatggaattaacgatagaagagtgaaaatgaaaaaggccgatagtgaatttatcaaggggcgtattgccccttgcggactgcattgcggaaagtgctttgctttttctgacggagacatctcttatcatagcaacgaactcaaaaagtcactgggcaattttgatgtgtacgcacagcgttttgtggacttgcttgacgaacccgtctttgcaaagtatccggactttaaggagtttttgaatcacctgtccgtagcgacttgtcagggatgtagaaaggagaagtgcaagttgtttaaaacctgcaatgtacgtgcatgcagcgaggagaaacaagtcgattattgtttccagtgcagccgcttcccctgtgaaaacactggtttcgacgagcatttatataaaagatttgtaactatcaacaaacggatgcaggagatcggagtggaaaagtattacgaggaaatcaaagatattcctcgttactaggtcgtcggttcctctctttatctcatttcctgtgcgtaaatgttgatggctcgcagtgcctttgaaatctcagtcggggtgatgtcctgacattctattcttaatactttctcccagtcctccatatctacattccatttgtagatttggggacatagggtgaaaagagccgcgatatgttttatatcccgcgcattccttattgaggttcggaaaatgagtatttgcccttccatagttgctatcaattacttttgtttaccttgcaaaggtaggcttaaaaaggcttcggtatagaattattcgacgaatgccgtgattactcatgacgaattaagtaatttgggagactaacaatagggcatttgtatagttgtccttctccatttaaaatctttatccggatatggcgataccccatacatcgtcttttagtgcttgaccccttcaaataaatcgcggttgtctcgtgaactctgtgaattgcgcttgaagtcattgaatgtataactgatagtcaacgtaattacagggaatttcggttgaatccgtgtgatcgattgtaaattggctgtctcaatgtcacttctgtaacgggcagaattgaatatatcccgaaaggagagggtagattgcagatgaggactgaacaactgctgacgaatagccagattgacaaaccaaaaagaatccgacctcccttgtgtagtaaccgaaggacccacgaaattcccgtccagctgaatacgggtattcttatgaacccgaaaaaggttattgactgtaaagtcataattggtactcgtttccttttttcctcccgaatttatattattcattaccttataatagtaaatatttccgttgacgtccagattccaccatttagtgactttcaactgggtacttagctccacgcctaacgaatagtcattgcctacgttagccatggagtctaatgtaactcctgcctcgtacggaacgcgcaagcgctcaatcttgtctttacgttttctgtagaacaggctggattgcaaagtgtgctctcccatcgtctttttgtaattcagctcgaaagaatgtatgtattcgggccggatatccggattgccgatttcagctgtgtaataatcgcgataagtaatgtaaggctccataaaaaagagttccggacggttggtacggtacgaataggcgaatgtcagcttctgttcgtgcggcagcgtgtatcccaaatgtacggatgggaacacctcaaaacgattcaccgtgcggtccgaaccttcaatagagcttcgcagcacctggtgtgtatgttcacctctcacccctatctgcacgtcaaatgctttataactgtcacttcccatgacataaacggaatgaataccccgctgaaaatagaaagtgttatagatatcctccctccaataaaattcctttttctccggattccagaattgcatcgtgtaatcgccgtcttccagatacgaatgatattgatacccgctttccagcagaccggtcttgctatacggatagctgtaggacagattgccttggactgtccagcgtttttcgtcttcccacgcacggtgtccctgctgacgttgttcgttcttgtcgaaaaggtcactctggaaatattcaaggggattgtcttcataacccagcataaagctgccggttagggtatgcccgttgtcgttaaacttatgggagaatcctgcttttccgatattgaccgtcgagtgcaggtcatatttgtcgcggctagaatagttggatggggcggatgctgcggcggaattggaatgtgtctctgtataatcgaggtccccttcgcgggtaaacttgtcatataccacctgcaactctgcattgacggaggttttgggagtaaaagcgtaatcaatgcctccccgtagtccatagtgataattcttcccgattcgcggaccatcggacagggaggtggtggttttgtccccaacaacagtcgtcttcctttgttcgaaatcgctcttacggatgggattgttccagtgcccggcaaggtgccactgtaacttcttgtgttgctgggacaacaggaaatccagaccattggagagagccgtgctgccatacgcattgactataccgttgatacccgcttgtttgtttttcttggtgatgatgttaatcattcctacttctccgtccgtatcatagcgtgccgaaggcgtagtaatgatttctatgttctctatctgggtggaaggaatctgttgcagggcctgtgaaccggaataaaagctgggcttcccgtcgatatataccttaaatccactgcttccgcgaaaggtaacttcaccatccacatcgacccggacggagggagtattttccagaatatcgaccgccgttccgccgctgctcatgagattgttcgaagcgtctataatctttttgtccagcttgtagatgacttgccttttggctgcctgcaccactacttcggctatacctacttccaaaggttgcagttcgataatacctaagtccgtcactgattcggaagaggtgatactaatggcgccttgtgtgtagatgtcatagccgatcagtctcaccattaacgagtattctcctttggcaatacccgataagtggaagtcgccgttctctttagtatgggtaaatgaagcgggaccggtttcgcctttcttcgttagtacgacatcggcaaactctatcgggttgcctgtacctttttcctgcacttttcctttgatctgtacgggaaccgccatgaggcagttgaaactaaacataaaaagaatgagaataattgtagttttcatgatcgtgttgatagtttgttttatgctgcaaagttaatgaagtatttccgacattagaataaattggttggctatatagcgcttgtgtcacggaaagatacatatttgtcacgataagacatggacggccggaaatctgtacctgttaatatatagaaaagtgtgtctgtttccgtctttcttttttgatttactttgcagtgttgttttaatctcctaatatacttaaaagttatgcagttgaattttgccaaaagaatgtcctatatcaaggcttcggaaataagagaaatactaaaagttactgaacaggaagatgtcatttcgtttgcaggcggtttgcccgctccagagctttttccaatagaggaaattaatgaaatcaatcagatcgtattgaaggaagcaggtactaaagcgcttcaatatacgactacggaaggttatgcccctttacgtgaatggattgccaaccggatgaatgaacgtttgggaacagcttttgataaagatcatattctgataacccacggttctcaacaagggctggacttatccggaaaagtgtttttggacaagggagatattgtactttgcgaaagtccgacatatctggctgctatcagcgcattcaaagcatacggatgtgactttatcgaaatccctacggatgaggacggtatggtgatggatattttggaagacgtcttaagtaatactcctcatataaagctgatatacgtgatacctacttttcagaatcctacggggaaaacgtggagtctggaaagacgcaggaagttggctgaattatctgccaaatatggtgtggcggttattgaagataatccgtatggcgagttaaggttcgaaggggaatctttaccttctataaagtcttttgatgaggctggcaatgttttgtgtacaggtagtttctctaaaatattctgtcccggtttccggatcggctggattgcgggagataaggatattattcgcaagtatgtattagtcaagcagggcacggacctgcaatgcaacaccatcgctcagatgaccattgccgaatatctgaaacgttttgatattgatcgacatattgcgaagatagtcgaagtatatagaaagcgcaggaatgttgcgattgaaagtatcgaacgttattttcccgatactgtaaagtttactcgtcccgaagggggattattcacatggatagaactccctgaggggatttcggcacgtgatgttttagttagaagtctggagaaaaagattgctttcgttccgggaggttccttttatcccaagggaaataaggaaaatacacttagaatcaactactccaatatgcccgaagaccggattgagaaaggacttaagactcttggggaagtggtaaaggaatatatcagccgatcagaatgattctttgatgatattccccagagtttgcaagcgctcttcgataaaagggctccattgctgaccgaaactcaaacgcatacagtttctgtattggtcgtgcagagtaaacattcgtccgggagcaatgctgattttatgttgcatcgctttataatacagttctgtggtatctgttctttgattcagttccacccaaagcatgaatcccccttgcggagtgatgattttcgtatcttcggggaaatagtcggtaatggattgtgccagatgaagactgttggtatgtagttcatggcgtaacttgcgtaaatgattctcatacctgccgttttccataaagttggcaatggcttcctggttgagggtaggagtggatattaaatgaatatgtttctgacggataatggcatccttaaacttaccgggggcaatccatcctacccggtaaccgggagccaatgtttttgatacggaaccgcaccacagtacaagacctttttcatcgaaagccttgcatggcttgggacgtgaatgcccgaagaatacatcaccgtataaatcatcttcaatcagagggatatcatgttctgccagcatctgtactatttcctttttatgttcatcaggcatacagcttccgagcgggttgctgaaattactgataagcagacataggctaatctgcggcaatacttttcttaaagcgtcgggttcaatgcctgttaccggatttgtcggtagttccagtacgcggagccccatgctgttggctaactgcaatattccgaaataaacgggactttcgacagctatgatgtctcctctctgagctatgacggacaatgccagagagatggaattggtaactcccgtagtcgttacaatgtcattttcagttaagtttccgttccagctatatgcgaagcgggctatgtattttctcagtcggatgtttccttgcgggtcttcataccttgtgccatttccgggaagagaatacattgctttgaccagttccttattgagctttgcgataggtaataaaacatcttccggtattcccagcgaaaaacgagtgatggatgaatcttcgatggaatgatatacctccatgattaagtctgcttcttcctttcctaaagattgggcagacggttgtgtcgttgccggagcggacaggtttaacggcttataattgactataaatcccgatttggggcgggaaatgataaatccttccttctccagttcgtaatatacctgaatggccgtgtttaaactcacgccatattcattgctgatagtacgcaaagaaggtaatttctcgcctgctttccatatacctatttttatttgccaggcgatggtgcctgctatcttctgatataggatttctcttttcattcttattctgtatccggcaaagatacaaaaaggatgtctgtatctgttgtgtttgatctattttgtggaatgtaaaagaatgacttgtgtgaagtgtgtattatcttagcagtcttgggtaaatggataagaatatgaatactgctataatcgataccgtcagaaaaagactgactgaaagtatagatggcaaagtgctggcggcttccgctcatttctttatatcggaatttgggaaattcaatatattaccaagacataataatataatctcattattgaacggagttaacctacgagaatattcccatctgttaaacttgggtcactcatggacaaatataaggcagtggtgagattactagtcatgtcaaatctgttaataatctgaatttagtttaaaaaactgtagtttggtgttgttgaatgctgttttttatgcgttgatattgttattcgtgataatgttattatctttgtggtataaacattgctatgtgagattgccaagaagattggtagtaatacgtaaagtgctgataatagaaaaaataataaataaacagattgaagttatgatacatactgttcctaatcccaagatgacaactcgcgaagttgataagtttcgtgaagattttcgaaagtgtgtgtctggaaaattaacacttaaagaaagaagagctatcaaaattcggactcaaagaatgagtgtagttgctaaaaggattatagctaataatggtggtaaaaacccaatacttggatattaatatttccataaataaattattaagagaggatcaagatacgattctctctttttcttgcggttgtgaagagttagataaattctttcatgaagaaatgtctctttgtatcaagcatcattatattacggcctactgtgttagagatattcaaaataatgaaattgtagcaatattcactttatctaacgattccgttgtaatagataatatagaagataaagaggatttcgttcaggaatcgaaagtcaagattaatgatgagtatattcctacattcgaaaaacaaacttccttcccggctataaacattggacatttaggagtacgtacagatttgcaatgtaaaggaataggagaacagattcttgattttgttttatataccttttcaaactttgatatatcaggttgccaattcattactgtagattcattaaataattcacggactaataagttttatgctagaaatggttttgtaaatcaaaccaatagtgataattgtaattcaactagacgtatgtatttacctatacaactatttgaattaatgggagatatcgaatga

SEQ ID NO: 24 - DNA, 5860 bp, unidentified
  source 1..5860: mol_type = unassigned DNA
ctagataaggtttaataattcctcattattccatctttcagcatattcactgcttaagtctgccgtgatacattcgtgcttattttcccctttttgtaaaccgataactctgatgtcaggaacagttttagcatactttcttattgtgagttccaataaaattcctaagcttatcgatttcatatcaggcggataaaacggttccgcactttgagcgtcatttaaacaggaaaaaataacatctattgcctgttcccacgtaataaaaaaccgggtagcttcaggatctgtcaatataagttccttcctattttctaatgcatacttccattttaccaaaacagaccctgtagaatgcaatacatttccataacgaactatcctataagcgcaattcgatccgtttatttgctcaaaatccccaaaaagattctccataagcaatttagtagccccatacgttcctgaaacttgaacagctttatcagtgcttgttgccagaataaattttatgttctgctcctcaacagttattttaagaagattcaacgtaccaagaatattagtctgaacagctttcagaggatgttcttttgccaaaatgacatctttaaacgcagccaaatgaaatatcccatcacaaccattcaatgcctttttcaataaaagataatcttcaatggggcatggaaagatttgaacgcttttaaatttctctctcagagcaatcagttttccttcattcctggctatcgcatgaatagtatgtccttgggtaatcaaccgttctatcaatttctcagccaaataaccggtagcccccgttactgcaatggttcccatactcaagctattttttatcattcatcaacacatccctcgcaacataaggctgtggagaaaactcaatagtcaacacattcgactctcctaaagctgttaatgtatggacgcaccccggtaaagtccgtaccaaatcccccttttcccaaatttcttctattacagcctcactatcatcatatttctgaaaagtggcatgcatacgcccctgtaaaataagcatatattccacctttctaaaatgataatgattgcctctaagaacctttggaacgaattgcaagaatcctatatatttagcggcttccaccgctggaattgaagcactcaaagtagtatcctcgccaattacaaaaccagttcccgcctccagcaagctataatttttcatatcccctacggattccacttttatcaaatccctgacagttatttcatcaaacattttttttgattgctcacgcacgtcaattttacataatccggcacgatattttaataaaaacaacttatgatgaggagcaaggttctccaatctcaaacactcatccatatccagcaagacaaaagattcaccttccaaaatacggatatccgctgcatcgtccatcaaataagtatgatgaatatattcccatctatcatagtctgctctatactcagaccccaaataggttatagaactaaaatgcaccttttgggatttcttgtgttcaaattcttccttcagttctctgataatgccatctagaggggtttcctcctcctcaaggtagccagaaacaagagaataatatccggagtactctatatccgggttctcatctcttttttgcaacaatactctattatctgttgtagtaataatcacagtagtcgaatccatcatctttttcattttcattattttttaaattttcattctgttgtattttcaccacacccacgtgatgaataatattttccttattcagcatatcagtataaatagcatggtttaacaccataataagcaaccaaataagagacaatatggcaaaaaaaggttgggtgtatgatttcagccataactcccaagactttttctctcttttcaaattagaaggaatctttgtgaaaagtttcacatactcatccggaaaagccttttccgcttcacataacatattcttccagtgctcatgataactccataatctctgcattacgtaaatagaccatattgaaaatgacaatccgccaaatgcaataataaatgtcagatattcagaagtttgacatatagagttaaacaagacggtttccaatccgaataaagaaacatttattccgaacataatattaaaacggctccagataccagctccttcatactgtaattgaccaagaaggtgagtataatgttccattaatttagtgttctgcaaggcatccctatcatttaccgcttttttattatctacatccgcataaaagtttataccgcatcgaactaatttcgtcattatatcaagaatatatttttataataaaaaaggagaggatattcttctgtaatcagattcatatcccctcctcgcttgaagttatcaagaagaaagcatatcaaatttaaactatactttctatcttagcccgaatgtttactgtacttttcttgttacagttaccttgaatgtcttggttacaacaccccagtcgtgagtataagtgatgatgaattgaacatcatgctcataaacagtacctgtaggttcgccattccaagtaaggataccgttagcatagctgtattcagccttgtctgcttcagagatatcaactttaacacctgtagattcagagtccttctgatacaatgtagctgcaataggttctgctttagcaagatcattggctccatcatatacaaccaacttattaccaacagcatctttcaaagtcaaatctatccatttcttcttgtcagcagcaactttcaagccattaatcaaatcaaagagattaatttgttcaccagttgctaatgcaggattgttatacttcaagtcaacaacatcagagaatgccaagatcggtgtttgcacagtccattcttctgtatcgaagagtacacgtttagaatcagtatcacctgctgtaatatcgtaaatatcaactttcagtttgccaaccttagccaaatctacacgtggagtaaatacaatctggttagtagtagcccacttgatatcaccactcttcatcatttcctgaacataagcgttctggttctttgaagccatatcaaatttcactatagcatcttcaggaacaacatcatacatttcgtcaaatacctgagattgcataatgaagtctgtgtaatttgctccactcttaacccattcacccatgataatgcggttcttatactgatccttaatcggacaatcgaatgtataagttacagagaagtcgttgattgtaaccttgaacagtttattctcatacttgttgtaaacaccgtaaggagtgttgataccatcggtcatcaccatatcatagtcactgttccaatcatagttattatatgaatagattgaccccatcaacaaattagccttcttgatttgtttctgaccagcacctggtgtcaaaattaagaataaagaatctttatctgcattatttccaccattcttatagtagagaacagcttcatttacaatggcattatcttcaaaatatttagcaacttcagttacatcttgatttcgtacattccagaaggaattgaaacattgactagacttgttagtataacctaccaacttgttggctgtgtcatattcaggtatatacaattgaacaaaagtagaatacaccgtattgttatatgaaacaacatcacgtccttcgatagcattttcaaagtcacgaacatccaaagtgataacttgagattttgcactattgtaagtaaatgtgaagttgtctgtagcgttcaacggtttcaaagcaacagttgagaagttaggattaacagcaggacgaactgctttgataaatactacattctttatctcataatctttaattccttcttcttgagccttaacagtagtagttacttcaatagctgcatattcatcaatagcagaagcttggttagttgatttcacagacaagacattatctttcagttcaaagataccttgatgagtcttaatagtttgacccttaaaagtgtattcttcattctgatccaacagtctgaaagccttttcataaacaatacctgtttcttttacccaaaccttagcactttgaatataaacatcaatagaatcatttacattgtaagtaccttgatagttgaatttaccaaaatcatatctatcataagcattccatccttcagtaataatcttcggataattgttacctgttacggtagtggaagtgaatgcgttcttgatattatcagtagtaacatttgttcttcctactgtaaagtaatcagaagcagaagtgtattgaccatacatagttacatctaaagaagttgcaactactgttccttcacttattccttcattaggtatcatggcaagtttcaatactccgtttgctaaagtagccgaaccatccatatataccaaagccggttctacactacgactcaatttgtatgtatcaacgaacgagaatttagcattgtccaatgagaaatcacccggataaaccttgaaagaagcataagcagggacagctgcaaacaattcattatctgtattatacacattataagcataacaaacatcataggcatcattaacagcctgttttctgtaaactacagtctgcaaccctttgaatgcagaaccttcctgcagcaaagtatagttctgtccgtcgatagtcacgattacagtcttgctttcagcatctacagcaatgttaggaaattcattgttctgcttcaaatcagtaactttgtcaccgatcttgatgtattccacaccatccactgtcacccaagacacgtttgaaccggcagcttcaccatcctgacctctggccggaactttgttaccttcggtatctttcacatccacccaagtagcacctttatctgtgctgacctgccagtaattgccttccacacggaattcagggataacagtagtaccggctgccccatctgttccattcgtaccattcttgatagtaattttggaaccgtcagtgaaaaccagttcatatccaccggtaacctcattacatgactgaacgaatttacctgccttaattgccgagtcaagacttgcaatggtttccttgacttcgctcaattccttgtcgatgcggtcaatgtcatcatcatagtccttacaagacacaaatgttcctgtcgaggtcaccattaaggctccgaacaggattgcacttaaaaactttttgttcataatagaaaaactttaaatttataaatttaaaaaactaaaattggttatacatatttggttcattataaatagcttagctaatttactgcctgcgaatgatgcctccttctttcttgagtctgatatgacaaaggtgataccccgacaatacggctgaaagcagagtagaaagcacttttcgaagcaaagccacaactgcaaggcagctcagtcagcgcacaacgtcgggaacagagaagttctttggcatattccacacgatacgtgttcacaagttccttcaaattacaaccgaagtatttgttcaccacattgctcagataggtctggtttgtttcaagcagtgcactcagtttcttcagagaaagcgaggtgtcaagaaatacctgacgtatctcaagctggtacaatatacctttatatatattacaatccaccttgcgaatgtctgtttcctttccggcaaactcctctttccattgccgctcggcagccttgaaaagcaaagtcttctgtcgctcggaagtagcggtcgtgcgtttacgtctcagaaatagatattccat

SEQ ID NO: 25 - DNA, 14318 bp, unidentified
  source 1..14318: mol_type = unassigned DNA
atggagatggaacagctctatgatgtgatcgtgataggtggagggccggccgggcttacggcggccctttatcttgccagggcacgctatcgcgtgttggtggtagagaaggagcatttcggcggccagatcactatcacgaatgagatcgtgaactatcccggcgtagcgaaaaccagcggtagagaattgacggacacaatgcggcagcaggcagagggcttcggtgcagagttcctgctggccgaggtcacggcttttgaactggacggagacgtcaagaccgtgaagaccgggcgcggagaataccgctgctttggcgtgcttctggccacgggcgcccatccgcgtatgataggctttcccggcgaggcggagttccgtggacggggcgtagcctactgcgccacctgcgacggcgagttttttaccggcaaggaggtttttgtcataggcggcggctttgccgcggcggaggagagcgttttcctgacacgctacgcaaagcacgtcaccatactgattcgcgaggaggacttcacctgcgccgaggctgtgtcgcgcgccgctaaagagcatccgaagattactgtcctctcccataccgcagtggtggaggccacgggcgatacggctctgcggagcctgcgatacagagatttgagaaccggagaggaaacggtttttgcaccgcatgaggataccttcggcgtgtttgtgtttgcgggctacgagccggaaacggccttgatccgggacaagatcgagactgacccgagaggctatatcgttacggacggctcgcagcggacgagccttgagggcgtatacgccgcgggcgacgtgtgcgtgaaggagctgcggcaggtggtcaccgccgtgggcgatggggcaaaggctgcgactgcgctggaaaagtatgccgcagccatgcaggaaaaaactggtcttcgcccccgaaagcctgagataaaagaaacgaaggcggcatccggcggcgaggctcagcccgaggggatattcccgcagcaggtaatgcagcagcttgaggcagtatttgaaagaatgcaggagcccctgatactggagctttgccttgacgagaaggctgtttcagaggaactccgctcctatatggaggagcttgcacgactcacacccaaactcacagtaagaaaatctaccgaaggcgctgagcatatgccgctggtgcgtgtgctgcgctctgacggcagcgactccggtctcgctttccacggggtaccgggcggacacgaatttacttcttttatcatggggctttacaacgtggccggaccgggacaggctcttgacggggaaactatgggccgaataaaggcgcttgatgcgcctacagatatgcagatattcgtttcgctgtcctgcaccatgtgcccggaactggtgatcgcagcccagcacatagccgccctcaaccctaatgtcagggcagaggcatacgatctgaatcacttccccgccttgaaggaaacgtataatgtcatgagcgtaccctgtctcgtgctgaacggcgaaaaggtactgttcgggaaaaagagcataagccagctgctggacacgctggaacagcaagagcaaaagagccgcacatcggatctgcccgagggatgatggccggaagcagtacatatcagttacttgagtaaccgctgccggcccctgcgctgacaacggcgttgtgataaccggggttgatatgcgactgaagccaaggcaggctgcacacaggcggcctgccttttcttccgccaagcggttagagatggctaactaaaatacagagcagaaaggaactcagagcttgaacagggaaaaggagatcgaaaccgttactctcatggtgcgccggtattgccggggcgtacatgggacaagggacggggtactttgcccggcgtgtgccgccctgccggaatatgccaggcagcggcgggacggatgcccgcatggggagatagacagccgtgagtgaacaaaaaagtttctgggacagaaatgccggttgttacgaccgctttatgcgaaaggatcgggcggcgtatgaggagatgtatacgctgatccggccggtcgtgaaagccaagacggtactggagcttgccaccggtacgggactgatcgcaaagcacatcgtgaatgcggcggcgcacatcgaggcgacggacgcctctgcggagatgattgcagaggccaagcgggacgaccgctcggcgaagctgcacttttccgtgcaggatatgttttgcctgccctacgcggataagtcctttgatgtagtgatcgtgtccaacgcgctgcacatcgtgccgcagccggagaaagcccttgccgagatccatcgggtactgaaagaggacggcgtgctcatcgcgcccaccttcacccacgcggggaactcgttttccggcaaggtcaaagcctttttcatgaagctggcgggctttcccctccacagcaggtggacgagcgagggatacctgcgtttcctgcggcaaaacggttggtcagtgcggaaaagcgttgttctgaaagcctcgttcctgctgacctatgcggaatgtgtgaaatcggaggggcaggatgttattttttgagaacacccgcaagcctgtggggcttggcgggaagctcatggtcgccatgatgaatgtcgggcacagtgccgtggcccggtgggggcttcaatttctgaatgctgcgccgttgtgcaaggcagtgtggcggatatgatcttcgcagacgactggttcgatgcggtcacagcctttgagatcctctatttctggcccgatctgccgcaggctgcggttcgtggactgcaacaagccgttctggaggaaacggatggaccaggcatttgtgcgggcgaaaggcggctgcgacaaatggcacgattacgagatgacgattgcgccttacgaaaacggccagcgcacttgtcctgtcccttggcatcgccattcagaattttcccgagggggcgatcatctccatgccgctccgggcggagggcgagagcaagggcagggcgtttctcggcggcgtgctctccggcgtggtggagcccatcggcgcggtgctgacgattcttgcggcgctgccgtattttctgagcttcgcggcgggcgccatgctctataaggcattggcggagtaagaaatgatgcccgccgctgacgacaactttagcgacagcttgcgcggtttgcgtttgccaaacagcctatccgaaaaggcagggacaccacttgcggggttcctgccttgcgctgtatggcgatgcttggagtattgaaaagaatatgcgcaggcatccaggacaggcggacagagagtctctgcattgaactgggcaaacagaaaaatcacaaacctcattgacaaactcgatctgctcggttataatataccagtagtatatactgctggtatatcgggaggcatcaatggaacgtacagagactcaaatgaagatcctcgaagtggggaaaaaagaatttctggaaaaaggattcaaggacgcatctctgaataaaatcgtcgcagaggcgggcttcacgaaaggcgccttctacggctattacccggataaggctgcgctttttgaagatcttgtgggcgaggcggcaaagggactgttggagcagttcaaagccgcacaggccgcccatttcgctcttgtctccgaggaaaagacgaaggacagcctgaagctgtccactgagtatttgcgtgtctttgtggaatatatgtacgcccattttgatgccttcaagctgatcctctgccgggcggaaggtacgcgctatgcaaatttcttggaggagcttgtggaactggaggtagagtgctcagaggaatactacgcacttctccgcaaaagaggaaagctctccgggaaaatgacaaagcagcttcaccacatgatcaccagcgcctattttacggcggtatgtgagacgattgcccatgatatgcccaaagatgaagcgatgcggtatattgaggagcttgcaaagtttttcaactctggctggaaaggcttgctccggctggaataatgcacgatcacacaagcgctttaatttttttacacgcgagttagcatattctaactaaacgatataaaattggaggtcgtttattatgcttaaaacagattcgaagaagctggaaacaagggactttatatcagtgggcatcttttcgctcatctatgctgtggtggcgtttgtggttggcggtgctgcgcagatgacgccggtcactttcccgtttatgccaatgatcgtggcgctctttacggggacagttttcatgctctatgtggcaaaaataccgaagaagggagctctctccattctcggtgtaatcgcggcgatcttgctgtttgttacaggaatgttctggatgatgtccgtattcttcctgggcttcggcgtgatcgcggatattatctgcgcttccgctgatttcagatcctttaagaaaaacctgcttgcctactgcgtcatggcgcttgcgccgatgggggcatacattccaatggttgtcatgcccgcacagtttgatgcttttatgaagaataaaggtgacttctcctcctttgaaggagtgattcattcgattggggctgcctggtgggcgatccccgcaatgattatcgggacgatcgtctgcgcgatcatcggcggactgattggaaagaagcttatgaaaaaacactttgaaaaagcagggattgtataaatgagactcgacccacggacgaagcttctgattctcgcggtcacaagcgtttccgtttttatgaataaaagcatcgcggtggagtgtgtgcttgcggggattccgcttgtgcttctgagcacttccggcaatctgaaaagaacgctgaaatacgcagctttttttctcacgcttctgctgatccagctttttatcgtaccgaggctgcccgtgactttcggcgggatcgtctatatgtttgcagtgtatatccgcaagcttcttccctgttttatgctgggcagctttctgattgcaacgacaagcgtaagtaaatttcttgcggcgatcacaaagctccgattgtcgaaggggctcacgatcgctcttgccgttacgctccgttatttcccgaccatgagagaggagtgggcctccatacgggatgccatggcgctgcgagggatatcagcgtccgcggccgggctgatcagccatcctgtacagacgatggagcatgtctatgttcccctgcttgtttctgcttccagaatttcggacgagatcacgcaggcagcgattacaagaggcattgagcacacaggtgaaagaagctgtatagaggaaatcgcgttttcgtttgctgatttgctggtggtgattgcttacgctgcgctcgttgccggcatggtatacgcgggcatgaaaggggtgttttgattatgatatcgtttcaaaatgtctcttttacatacgctgaaagcgggaacggcggagtccttgatttgaaccttatcgttcggtccggcgaatgcgtgctgctttgcggaccatcaggatgtggaaaaacaaccgttacacggctcgcaaacggactgattccccatttcttccacggcaatctttcggggcaggtgaaggtaaacggtatggatacccgggagacagagattgctgcgctatcggatgcggtagggacggtttttcagaatcctcgaacgcagtttttcaatacggatacggacagcgagatcgtgtttgggcttgaaaatcggggcattccgcgagaggctctgcgctcccgattggatgaacttacggaggagctgcatcttagcgggctccggggtcgaaatatctttgaactgtccggcggcgagaagcagaagatcgcgttttccagcgtgtatgcttcggctcccgatgtccttgtgtttgacgagccatcatcgaatctcgacatgaaggccatcggagaattggcggatttgctccaacgggcgaaaatatcaggaaagaccattctgatcgcagagcaccgcatctggtatctgatggacattgtggaccgcgtcgtttatatgcaggatggccggattgcgtcggacatggaggcttcagcgttcaaggcgctgcctgaagcagatattcgcagaatgggactgcgtgtcaggaatctgtcggtatccgaatcgggcggcgtgaaaacaatcgctgccgatggatcgctttccgctcagaaaatcagcgtccgtctcggcggccggtatgtattgaatgatatctcttttcaggcaagccgcggagaaatcatcgccattgtgggcgccaacggcgccgggaaatcgaccctcgccagaatgctctgcggattgcaaaagaacgtctccggtactgttttgtgggctggaaaaccgatgagccggcggttgagacggaaaaaggcatacatggtcatgcaggatgtggggcaccagctctttaccgacagcgtggcggcggaatgcgcgcttggcataaaggccccgaacaaagacgagatcgaccgcgcattagaaaaggtggatctgctggcgtataaggaacggcatcccttgtctctttccggcgggcagatgcagcgccttgcggtcgtggtgagcgatatctgcggcaaggagctgctggtgttcgatgaacctaccagcggactggatctgaaaagcatggaagaggtcggaaccttgacacgaagccttgcgacgcaaggcaaggtgcttttgatcatcacacatgatattgagtttatgatgcggatctgcacaagaatactgttcatccgggacggagaaatcgcggaggacctttccggtggacagaaagaaaagattgtaagacttttgcgaggtgaggaatgatggcgggaaaagaaaactcggcgatgacgattctgatggattttgcgaagccgtgcaaagggaaactgatcggctccgttgtatttgcggttttgggggcgctttgcggcatgatcccctatatcgcggtgtcccgcgggatcattatgatctgccacgaagactatgctttcagcaagttggcgtttctggcattgattgcgtttgcgggctatctcgggcaggtgtggttcggaacgttttctacaatgaaaagccatgagtctgcctttatcattctgcggaatatccgcatggcgataacagagaagctctcccgtgtccccatgggaacgatccttgatacgccgtccgggaaattcaaaacgatcatcgtggacaccgtggaaaagctggagcttccgctggcgcatatggtaccggagctcactgccaacatcctgatcccagttctaatgctcgtttacctcttcagccttgattggagactcgcgctgatctctcttgtgacgattccggtgggtgccttctgctatatgggaatgatgaaggattacgagaagagatatgccagagtacttgccgcagggaaaaacatggatgccgcaacggtggaatacatcggcggcatcgaagtggtgaagacgttcaatcagggtgaacgctcatataaaaaatacgccgacgccgtggcggaaaacgagacagccaaagtgacctggttcaagcagaccaacggctactatgtgatggggctttccatcctgacggcaacgcttgtgggcgtgctgcccttggggagctggctctttataaacggaagggtcgaagcgggtacgctgatcacctgcatcatcctcgcccttggactcgtaaaaccactgattcaggcattgcagtacaccgacagcctggccatggtggattccaccgtaaaagaggtaggggatcttctggatgagccggagcttgtgcggccgaccgagagagctgtccttgcggatgccgacgtatcctttgatcgtgttaccttccggtacaaagagacggaggttttgcatgggatttcctttgactgcgcaaaaaacggtatgacggccattgtgggtccctccggctccggtaaatctaccattgcgcggctcatcgcctccttctgggaggcggagagcggctgcgtccgtattggcggcgtggacgtgcggaacattcctctccctcagataatggagcttgtctcatatgtgtcacaggataacttcctgttccatctgtctatccgggaaaacattcggattggaaaaccggaggccacagacgcagagatcgaggcagcggcaaaaaaagcgagctgtcacgatttcatcgccgctctgccggagggctatgatacgctggcgggcgatgcgggaagccacctctccggcggagaaaggcagcggatcgccattgcaagggcgatcctgaagaacagcccgatcgtggtgctggatgaagccacggcatttaccgaccctgaaaatgaggccgttattcaagcatccatcgcagggcttgtagcaggaaaagctttaattgtcattgcgcatcggctgtctaccattacaaaagcagacaagatccttgtcgtggagaaagggaatgtcgctgcggaaggaacccatgaggagcttcttgaaacaagcgatctatacaaggaattgtggaaagcccatatgcagggcaaagataccgcagaggaggtggcgggatgataaggctgtttcaaagacttttgttgttctcgggcttacagaagaagcgtcttatccgctcttttcttgcatacctcgtcagctcattctttgagatgatcccaatcatggccattctaacggtgctcacaggaatcctgaagcagctttccggcgatgttatgcctgaaagcacgatctggatctcgcttggcatcatgatcgtttccattgcagggcgaatcgtgtttgtcgatctttctgccaatgccagaactcttggcagcttcgcgttcgggtcggaaaagcgcatggagatcggcgaacgcctgaaaagggcgcctatgggctatttcaatgaaaacaggctcggggatatcactgcggcggtgacgaccacacttggcgatctggagcagcagtccgttaccattatggaaaatgtggcgggcgggtttatccacgccatcgtgattggcgtttggcttatgatctatgagtggcggatcgggctgatctccttggccggacttgctgtggcgctccttgtttattcgcttatcggcaaggtcggcaggaaacacgcaccccgccgtcaggcagcccaggctggcctggtcactgccgttttggaatatgtgcagggcatgggcgtagtcaaggcgtttgggctggcggagcgcaccggaaaagcagttgacaccgcaatcgaggaaagcaaagaggcaaatatcgtgcttgaaaaggcgttttccaaaatgacggcgctctatcagacggtgttcaagctcgcacgggcggctattctggtttttgcgccctatcttttggcaggaggaagcatcacgccggagaagtgcctgctgcttctcgtgtccagcttcatgatctatgccgccgtggaggtggcgggcagtatgtcctccgttgcccgcgcggtggaggcttccctggaccggctggataacatcatggacattccatccctggacgaaaacggggcggatcttgtgccggaaaatttcaatatcgaagtgaaggatatgtcctttggatacggggaaaaggaggtattgcatcaaatcagcttaagcgtgccccagggaagctcctgcgccatcgttggtccctccggctccggaaaaaccacgctggtcggtctgatcgcccgtttctgggatgtgaaggaaggacagatcacgctcggcggccgggatgtgcgggaatataccagcggcagccttctcaagaatttcgccatcgtatttcagaatgtgtatctctttgaggacaccgtcgagaacaatatccggtttggcagaccggacgcaagcgaggatgaaatcatagcagtcgcaaagaaagcctgctgccatgactttatcatgacgctgcccgacggttatcagacaacgatcggcgaaggaggctccagcctctccggcggagaaaagcagcggatctccattgcaagggcaattctgaaggacgcacccatcgtcattttggatgaagctacagccagcgtggatcccgaaaacgagcaggagctgcaaaaggccatccgggagctgacaaaaggcaaaacgatcctgatgatcgcccaccgtctgtccaccgtgcgcacggcagatcaaatcatcgtgctggagaacggcaggatcgttcaacgcggaaaccatgaggagctgatgcacgaagacggcctgtacaggcgctttgtgggaatgcgcagccaggcgatcggctggacgctgaaaggcgggaaagcagatggatagaaggctagacaaaagatacttgaccggagcggtatctgcaatggaaaaacagtatggcgtggaaaagacaggcgcgatcatagaagatgcatggagacgttatgcggaaatcgtagacgaaaacgccgacgagccgaaaaagatgtatatgcatacgaggaaacgcatctatcctgccatcgccgcctttgacgccatgacgggaaatggaatctcccgtgaggaagcggcggcttttctgaatagatattatgaaaagcgggcagcgggcgttggtgcaaaaatccgaggggcaatgaagataccgggtctgtataagctggtgccgaggttctttgccaaaatgacaaaaagctcctttggagaggactgcggttttcgggctgattggatacgaacagagcaggaggaaatgtgcttcgacatgctggcctgcccctatcaggacacctgtgtgaaatacggctgcccggagatcgtggccggcttttgccgcgcggatgacgaggcctacgggcatatgcatccaaagctcaaatggggacggacaaagacgctcggacagggcggagactgctgtgattttagactgacgatagagtcatgaccctatggaaagacggatgagatacaagaccctccaatgctttcttgcggcgctgactatgatcgcgttcctcgctcctgctgcatatgcatccggtacaccggacgcatatgaggcaggcgcaaacgctgtttccgaaaagtatattggcaaaacggttccaggcgcgtgtgtcgtgatttcggaattgcggcggccatctgcgggtctttcacggggatcagctatgccgtaaagagaaaaaccagagcatcggtccttacgatcgttttatttgcatcgcaaattatagctgcgtggatgctcggattcttaacagtaatataaattaacagaaaacggaggaatggatttatggacaaaaagaaaaagtggacggtcaaggatgttattacaacggtattgctctccgcagtgctgatcgtgatccagctcgtcgtcaatatggtctgcatggccaacgactttgtcagcatggtactgtcggtggggatcaccatgttcctctgcgcgccggtctatatgctcatggtcagccggatcggcaagcggtttgtgacgctgatctatatgacgatcctcggcgtgattttcctgttgatgggcaactggttcttgcttccttattatgttctcgtggggatcctctgcgaggcgattctctggaaggaaggctcctgccaaaaaccgaaacggctgaccgccgtctggacagcggcaagccttttatacaacggggtcaatctgctgcccatctggttcttctgggatacctactacgattttgcgctggcaagcggcatggagcagagctacatcgattcctatgtgcgttactacacctctcccggctggctggcctttattctgctgttcacgacgctgatgggctttttaggctgcatggtgggcagccggctgatccgcaggcattttcagaaggccggcgtcctatgagagcggacgcatcctttgcggtgccggtcaagctgtgggcgctgctgtgcgtctttgccggagtgaccatcggcgggaatgtgctgctcacctgcatcctgaccggcggcgcgcttctttatctcgtcttacagcggaacttccgccttgccgcgtcctatggctgcttttatctgctgctggcgctgctgctctacggcatccgcttccacgggctgcgcatgccggtcttttcggagttttatgtcctgatgttctggaatctgtcaccgatctttctggtgtcatgggatctgatcaccacgccgccggggatgctctccgcgttcttatcccgcctccgtatgcccaccccgttcattctcgggcttcttgtggtctttcgcttcttccctaccatgcggacggagctgaaaggcgtaggcaggtccatgaaaaaccgggggctgaccgcggcgggacagctgctcgcacatcccgtgcagagcatggagtatgtgctggttccgtttcttcttcgggtattgcagcttgcggatcagctttccgtttccgccgttgcaagaggcgcggagcgtccgggcgtgcgcggcagctattatgagaaaaggatcggggcgcgggatcgcatcgcggcagccgcatgtgcgatagtcacggcttcctatttggttttggaaaggagcatggcatgatcgagcttacacgcgcttcctttcaatacgaaaactcggacagaggcgtgcgggacatttccctttcggtaaaaagcggcgaatgcgtcgtgctgacggggctttccggctgcggcaagaccaccgtgacaaggcttgtcaacggacttgcgccgtcctattatcccggagccttcagcggaagtgtgaggatagacggcaaggacatatcaaggctttccacatgggagatcgggcatttggtgggaagcgtttttcaggaccccaaaagccagttcttttcctccgagcttgccggagaggtggcctttccctgcgagaattacggcctgtccacccgggagatacgggagaggacggacgccgccatagaggcattgaagctgtcccgtttgagagacagggcagttgacgtcctctcaagcggagaaaagcagcgggcggccattgcgtccgtatatgccatgaagccaagggtctttgtgtgcgacgagccgacgtccaacctcgatgccgccgggacgcggcagcttgcgcagaccctttggcagctcaaggagcagggctttaccctgctcctcgcggagcatcggatcgactggctgatggggatcgcagaccgctttttatatctgcgggatggcagaatagcggccgagtatacaccggaggatctgctcctcctgccaaaagcggacatcttagggatgggcctgcgttctccgcacgagggaaagtgccctcccgctccctccgtattggacgagagccctgccgtcttgaagacagcagggctctcgaaaagaatatgcagagaagtcattttcgatgatgtttccctctcctttccgaaaggcagagtgaccgccataacggggcaaaacggcgcggggaaaaccacccttgcgcagatcctctgcgggctggcaaggcagacaaggggacatatcctgatagatgggaaaaaagcaagagcggcagtccggcgcagggagatctattactgcggcaacgacacgtcaacgcagttttttgcggcgagcgtggcggaggagctgctgctgaataccagatcgacagaagaaagcaagagccgtgcaaggaacctgctcgaagagcttgggctttacgagtacagggacgcgcacccgtccaccctgtccggcgggcagaagcagcgccttgccatcgcctgcgccgtcttttccggccgcgggatactgatccttgacgagcccaccagcggtcttgacgggcagaatatgcgcctgatcgcggaaaggctgaaaagcgaagcgcggaacggcagaaccatcctcgtgatcacccacgacagggaactgatcgagagctgctgcgataacattgtggaggttgaaaaacgatcatcatgaaaccgccaaggggcgctatgggatatccgcgccggagaaatcgttttccgctcctgccggcagctccaccgcgatggtcgtgcccttgtccgagctttcctccacccaaacggagccgccgtggaggttggcgatctcccacaccagagaaagtcccagtcccgcgccgccgtactcgcggctgcgggatttgtctacccggaa

SEQ ID NO: 26 - DNA, 6407 bp, unidentified
  source 1..6407: mol_type = unassigned DNA
ctatttaatcgtccttagaatactttcaagctcttccatactatcagtctgaagtatgatataccctaaacggtctaaagagttttttatttttttttcagaataaggtcttatttcagaccgaaaaacagccgatgaccgggaagagcttagaaaatccacacaacgctgatagttgagcggattaaggaactgtaccgctgagcatttttcatgtttgcgaaggacatcaacgggcaaaccaagagaacagttcaccagatttctcagcatatctatcccggttgacaatggaaccaaatcagaggttatataatctcctccaagccggcaagcaatttctatgatataagcgcccgattcattcagctttatttctgtatgcgagggacaattattaagtccaatcaggcaaagtgcttttgatacggtctccgaaaccagctcccactcctgtttcgttatacgcgccggttcaatgtgcgtatcttcaacaaagaagccttctgcctcaccgatacaaagtttctccgtaatagtgacaacggtagttttattgttttgcgtatatgtttcaacactgaattcacggcctgttataaagccctcgacaatggcctttccggtacgggaataaccgagagcttcggaaaaagcaagtacaagttctttatgatttgtaaccttttttactccgcggcttgcagaggaatctaccggtttgacaatatatggataatcttgcaatgtgcccaagtccgtatctttatcacaaagcatgaaaaatggtacatcaatcccgttggccgcaaacatttccctctgcaagtatttgtttgtacagatttttgcgacctcagtggacatggacggaagccccagctgttccccgacataggaaaccacatttacaggcgcgtcacttgtagtaagtatgccgtcaacagagtgacgtttggcacattccaaaacaccttccttatccatcgtgctgacaagaaccggttccgaggcgtaccccattcccggagtattcgcatccatatctgcgactatggtatgcaatcccatatcgttcgcctttcggatgacaggaacctgcatttcacctgcgcccagtatcaataatcttttattcatataaccgaatttatcacatcacagatctttcttgcctgtgcttcactgaaccagaaatcattaaacaaattgacgatatgcttcacctccacttccgcaacaggagaagaaacacctttgaacatgtatgaaaccgaagggaaattagtcccggcaaacagaccggccttgaatattgcgtcaagaaccttctgccggttctcgatgacaatcatgaacctccagttctggaaatcatctcccatctgaatcgattcaggaagcagattcctgtatatcttgtttattttctctttttccgcaatcacttttgggagctttctttcaatgatgtcaaaatattcctcatcggtcatttgcaaatttgaggcgtccagccaaggatagtcagccggaagcatatatctgacattctccaggagacatttccttatatataccgaatgcttttgttcactaatgctatcatactaataatcaacaacttcgtaccccctaaaacttgcatagccaccataggaaagttctatgaatttagcatatccggtactgtaaaggcagagatccacattttcaggcaaggaatctaccaattcgggaatgcacaaacaacaatcatcaatgatacaaagattttgatcgagacttttcactgctcggtaaaattctttgttgtcatactttttcccgtaggcatgcacaaatacaagaccggaatattttcccgcctctatagctgtcaaacatttctcggttgacatggcatggctttcatctatgtctataaattcaaaaccgacacctgctttcataaacgacaggggcactacaggacacacatttgccggcaataagaacggtttatcaaaatggttgccagacagataattatacaatatggccgaagctctttgtgaagttacttgcatatcaacagacttttaaacaaattgacaaaccgtttgggaatatccggagtgatggcatgtcttttacgaatggccatcttatccaaattctcagcaacaagagtaaaggcagcggcatcggtataatcacccaccccctgaatcagcccttcacgcaaaaacatataatagtcgtactcctgattatcaacataataccctcctataacaggagttccacaggccaatgcctcattcatcatcgtagaggcaggcaatatggcgacatctacagtactaaacaagtctgcaatggaaccggcagacaaattcttctgataggttactttggggtcatcaaccatattctcggctgcatacgaatcaccgacaattgccgttatcttcttcacattgtctttggctttaattgcatgaatggtctgatacgtcaaattcaagaaatcagaaccaccaaaagccaccaatacatataaacctcctgaataattgttccgtttattctgcagcgcaacattgaagaaaggcctcctcaacaatgaaaattgaagcccaaaggcaaattgagtatatggttcacacgaatagtcatcacgcgtgtaacccaatccctgattgactataagatcagccacatagtgcttgtcgtgcatatcatccacacacaccagacagcaacctttttgcttgatggcacgctggtaatcagtagtaaagaaatagttgtcaagtaccacaatttcgtcaccttgtaaaagggaaaggaactcatcataatgcgattcttcctgtaaggggatgaaaggacataccttctccatctcactcacctgataaggggtaggatggcaagtaaagaaggtacaatcaaaatcgtccttcagcatatcggccaaagccagagtacgaataaagtgaccgtagccgatggcagcacttgcatcggcacggagatagattttctgcattacatcatttatgaagcaactcatacttcatctctgccaatgcccagtcagtctgtgtatcaaggtcctgcacttcaagttcggaaagtaccaacccggctgtattctcaccccaaaaagtccggctctccacaaagggagcagtgcgagagaaatagaactgaccggcatcgtgataaatcggttctaaatcttgggaacgtgcatttttgtattcgggataaaccatactaatttttccatccacgatgtgaaggctgcgctgtataggataggaataagccacacaagtgaaaacggaatctatctccgaattcatttttccgtatgcttcccggagtctttcgggagtgacaaaaggagccgttgagtaaatgcaacaaaccgtttcaaactccctgccttgctctttatacttcctcagtacttcaagaattacatcatcagtaccggcatagtcatttgacatctcggcactccgcataaaaggaactttggcaccatacttacaagctattccggcaatctcctcatcatcggtagaaaccatcacctcctcaaaaagaccgctttgtaaagctgcctctatggaatatgtaatgataggtttacccataaagggcttgatattcttacgcggaatacgtttactgccgccacgtgcaggaatgattgctatatttttcatttcgctacaaattctataaccttttcaatcacatactcctgttcctcgtccgtcagcgtgggatacatcggaagactcagacaatgttcgtaatactcttctactataggtaaatcgcctttcctattgccccactgctgatagtaaggcatcagatgaagcggagcataatgaacctgcgcatagacattgttctcgtgcagataattataaaggcccaagcggtcagctacttgaatgatataaaggtgataagcatgatagacatcggcagcattgaacggagtcttgatgccatctattccggaaaacgcttcattatagcgtctcacgatttcatggcggcgttcaagacctgctttcgcacgctccagctgagaaatacccaaggcagcctgaaaatcagtcagacggtaattataccctaactcctgcatctcataataccagccaccatgatgctcgtgtaataaagcagggtctttcgtaatgccatgcgtacggtaaagacaaagcctgtcatagagctccttgctgttggtggtcaccatgcctccctcacccgtagcgatatgtttcacgggatggaaagagaatacggcacagtcggcaaaacgaccgttaccacaatgttgtttcttgcctttactgtccatgaaatagccgccgggagcatggcaggcatcctcgataatccacaaaccgtactcgtcggcaagctttctgaactcttccagatccaaaggatagcctgcaaaatcaactggaacaatacctttgtaagtaccgcggggagaagctttaagcatggcttcaagtttacggatatccatgaggtaagtatccttgtcaatatcacagaataccacctcgccgccacaatagcggatgcagttggcactggcagcaaaggtcatgggagtgacaatcaccttgtcacccggctttacattcagtgcggtagctgcaagatgaagccctgaagtggcattgttcaccgctacggcatattgtgcacctacatattcggcaaatttcgtttcaaattccctgattttgggaccttgtgtcaggtaatcgcttttcaaggtatcgatgactgcccggatatcctcatctgtgatatgctgacgaccgtatggaataggcttgcttatcatttcacctcgaaattagggtcaacgtatttctttatattctcgcgcatagtctctactgtctcccactccgtattgttgtcactgctgtagtggaaaccgtcgggaacgggtactgcattgtgatgtctgatgaactcttcgcgactgtgcttgaaagatacggaaggaagaatgacataatatctgcccaaatcgattgtatcaagagcatcggttacagtaatcatctcctcgtgcagcttctctcccggacggatgcccacttccacctgcggcagattgggtgcaatggcggtagccacgtcctggatatgataggaaggaatcttaggaataaagatttcaccacccaggtgatgtccgatggcatacatgaccaaagcgacaccggcttccagcgaaatgttgaaacgggtcatgcgcatatcggttatgggaagttccttcgccccgttgtcacgcttgttgataaagaaagggattacggaaccgcgggaacccatcacattgccataacggactacggagaaccggatgttcttggaaccgctgatattgttggcagcagtaaacagcttgtcggaagtgagcttggtggcgccataaagattgatgggggcacatgccttgtcggtagaaagggccaccacatgctgtacaccggtggcaagagcagcctttatcacattctgcgcaccgtgtacattggttttgatgcactcttcgggattgtattcagcggtatccacctgcttgatggcggctgcatggataatcacgtccactccttcgcaagcccgcgtcaggcgttcgaggtcacggacatcaccgataaagaaacgcagttgcggatacttatgaccgggatatttctgtttcagctcaaattgcttcagctcatcgcgggagtaaataatgattttctttacttgcggataatcacggaggatggtttccacaaacttctttccgaaggaacccgttcctccggtaatcaatacggatttattgttaagcattataatgaaaagttttattcatcgatatattcccacggatagggattgtctgtcacattctgaaactcatcaaccgcttcctgctgtttgggagtaagtgataaggaatcccaggaggcgatgatggaacggccttcgtcggccaaagactcgtcgaacacttcaccgtagcaggcggtaagcagacggagcttcagtaaggaagcgggaagggcatcgagcacatcccaacaacagtccagcactttctggacatgccgctgcttttcgccatggtccacaaaagaggcgctgtaacccataagaagggcaagacagacatttgcctgctcgtcgatggtagtgccttttacacccgaccggtacaaagccatggtaagacggtagacctcaccgttccgccgtgacaagtcatcgctatagacgggactgccgtccatacccaaatacatcagttcgtgcgcagcacgctgaagagtgattgcttcttcggaaagagacat

SEQ ID NO: 27 - DNA, 12216 bp, unidentified
  source 1..12216: mol_type = unassigned DNA
ttaagactgtgcgctttgcagcatatgaagaaggtgcttttccagcgccttttcttcgttttggcagaaccagaagtggctcgattcgtgcagttgaagcacctgcgcgcccggcaggctgcgccgcacgagcgcgagcgaacgcgagaaggagacaagttcatccccgatggaattcgcaactgcaagcggcggcacgaggcgcggcaggtttttccgcgtccgccccattaggcgcagcaggccgagcgagttcgggatcagcgcgggcgcgttccaaagcgtaacgcccgacacgccgcgcagttcccgcgccgcaacgatgcgcggatcctcgccgggtcgttcccggcaagccgacgcggcgcggatgcggatccccacccatgtcatgcgcaaatacagcgggaaggccagcgcaaaaatccctacgatcctatccggccgctttgccgccgcgttgaccgcgagcaggccgcccatggaatggctcacgaccaggagcgttttttgttgtgcttgcagcgcggcaagctccgcgtccacatgcgcctgccattcccgcctgcccgcccgcaggaattcccgcagggtcccgccatgccccggcagcgtgagcagccggacttccgccccacgagctgccaccgcttccgcaaacggcgcaaacagggcgctgtttcccataaagccgtgtatgaacacgacgcatacgtccttcatttcaggtgcctttccatggcgcatgccgttacagatatagctttaagacgatctccccgccgttctcctccccattttcccggaagccgaacttgtgatacagcgcgagcgcacccgcattgctttccttggtggagagggtgatctcgtccacgccgtgcgctttgaagtaccggatgatctcgcgcagcgcagcgctcccatagcccttgccctgatgggaagcgtcgatcatgaagcgccacagccagtatttatcgtgcggatcgtcgttggcttcgtcgaacgcgaacatcgcaaagcccaccaactgcccatcggcataaaccgcgaacggccgcgccacgtccgggttttctaccgccgtgttcagggacgcttcgttgctggcgatgtattccgcctgctccggcgccaccttgagcgcgatgcagcccgcccggttcccatcgtcaatttttctcagttccacgttcattttggggtaacccctcttttcaatttgcttatttgtctgccgctccccttcaccggatgaagttggtcacggccccgcgttcgcgttccggcgcgagtacgccctgtgcgcggcccgcctcgatgcatttgagcagccaggccatgttccgcgccaggttgcgcatggtctgcaagccctccagatcctgcgccacgtcttccgcgtgctccccgaacgcgacattccaatacgtggaggatacgaccggcatctgcgcaatggtgaaatacttgttcagcacatccacggaagccacgttgcccgcccgccgcgcgacggccaccgccgcgcccggcttgtgcataaagagatcccggcatccgtacatcgcccggtcgagaaaggattggatgctccccgtcgggtgcgaaaaatacaccggcgtaccgaacacgaagccgtccgttcccttcgatttggcgaggaattcgttcacgcggtcgtctttgaacacgcaggcatgcagcttcctgcacacgccgcagtccacgcaatcctgcaccggaccgtttccaatccagaaaagttccgcagaaacgccctcggcttcgagcgtctttgcggcctcgctgagcgcggcgtgggtgctgcccgcctcgtgcgggctcccgttgagcagcaataccttcattttcgcattcctccttgctatggcttaattaaacttccagcccctgcacgaagcggtagagcggcttcatcgcgtcaaagccgtccagcacctcgtcgagcagcgcgggttcaaacgtctttttcagatccttggtgtaatagcaccagctgatgcccttgcggttgaggtagggcttgagcgcctccggcgcgtccgggaaatggtcccgcttatacggctcgccgcgcacctcgaacttggcgaggcgtggatccgcaaggatcgaaaggaagcgctccgggtcggccagaaggcgcgcgcggaagggcttcatcagctccgaatttgcgccgtacatgcccatgccgtagccatagccgtccgggtcgatctcaaaatacacgcagaggctttcactcgtgcgcgtgtccgggtggcggaagccgatccagccatggtcgcggtacgggcgcttgtccttggaaaaacgcgtgtcccggttcatgcgggaaacgacggtcgtaagccgcgtgttgaagttcgggtcaagctcgagcgcggcggggataaggtctgttgcgagcgcgcgcattggttcctgcaccacgcgcttgcagcgcgcccggttcgcgtcaaagaagggcttttcgttgtaaaagcccagctccatcagaaaacgatacgtgtcgggttcaaaccccttgaagttctgtcccatcttttcatccatccattgttccgtttaaaacgtcaatttcatcaaaaaggattcgcgcccttccggctggatcacgccgcgcaggatcaccgcgtccttcgtctccgcacgctccattgcgaattccgcgccctccgtcagctccgttttaaaccagacgtccagccgcttcagcgcgccgatgctgccgcgctcctccgccgtaagcgcatcgtaagcgaattcgccgtaccgctcgttgttcacatggccgagcccatcgatccagctcgggcgcacggtgcggcgctccacctccgcaaaatcggcgcgctccgaaaagcgtttttccgcatgcagcagctcctcgccgcccggcaggtcgaaccgcgaaaggatgctccggtccatgcagagccggtgcgtccttacatccagcagggaggaaaacgtcgcgcctgcggcgacaagcgcgttctcctcgtcgtaaaacgcgatctccctgcggtaggtgggcggtacatagcgcgtgtgccaggtgcgcagggtcagcctgtccttgatgcggatgggccgcatgagcgcgacgctcatcgaaagcagcacccaggccacgccgtattgtgccgaaatgcggggcgtgtcgatctctatcgcttccaaatgcctgccgatggtctccaccgcgatgcgctgatacgccgccgggtacagcgcgcccgcggcgctgcacatgctcacgtccacatataccgggtaggcatagtcctgttctctccaaccggggttcatcgttccctccttcgttctatttggttctttgcctatcataccacgatttacgggcaaatgaaaagcgccatccgaagggagaggcggatggcgcttttgcgggtaaggcttacgccttatttggcagccttcgcggcgcggatggcctcgatgagcatcggagtcaccttgaacagatcgccgcagatgccgtaatcagcaacctcaaagatgggcgccgtctcgtttttgttcaccgcaatgatgcactcggaatcctgcatgccggccttgtgctggatcgcgccggagatgccgagggcgacgtataccttcgggtgtacggtcttgcccgtctggccgacctgatggtcagcgctcagccagcctgcgtcgatcgccgcgcgggaaccgccgacgacgccgccgagctccgcggcaagctcttccgcgagcctgatgccctgctccacgtcccggctgatgccacggccgacggagacgacaaagtccgcgccaacgagatcgacgagcttcttcgcagccttgaccacttccacgacctcggtcttgaggtcagcctcggtcagggagaattgcggcttcacgatcttgcatgcgtccgccttggcctggtcgaacgcggccttcttcatgacgcccgggcgcaccgtcgccatgctggggcggaagcgcgggcagatgatggaagccatcaggtggccgccgaacgccgggcgggtcatcttcatgtcgcgggaaacgtcatgatcctggcccagcacctttgccttcgaggtgcccgcaatgcgctcctcgggcagggtggagctttcacgcaggaagttcttgtagctttccatgtccacgtcgaggtgcgtgcagtccgcgcaaaggccggtgtgcaggcgcgccgcgcagcgggggccaaggtcgcggccgatgttggtcgcgccaatcaggaacgcttcgggcttgagctccatgatcacatcgcagatgaccttggtgtaagcgtcggtggtgtaatccttcagcagcgggctctcgcagacgatcacctcatccgcgccgtagccgccgagctccttggcgaggccttccacgttgtcgccgaggagcaggccgcacagctttacgccgagctcgtccgcgagcttgcggccttcggagatcagttcaaagtcggtgggcatcagtttgccctggcgctgctcgcagaacacccaaacatccttgaaagcagcaagatcggtattgttgaacgtagccattctcagttaacccctttctcagatgatgtgctttgccgcgagcatgctcgcaagcgtttcacagtccgccttctccgcgcccgggagcatcatgcccgcgcccttttgcggcggggtgaaggaggtgaggatgttggtgggagaacccttgaggccgatggtcgtggggtcgatcaacggatcgtccttgagcgcctcatagtcgaacaccgccatgggcttgtcgtagcactcaaagatgccgctcacgctcatgtagcggggctcgttgagctccttgatgcaggtcacgaggcagggggtcttgaccttgatggtcatgtagccgtcctccagcatgcgcttgacggtaatgcagtcgccctccttgtggatgtctgcagcgtaggtcacctggggcaggccgagcttctccgcgatctgcgggccgacctgcgcggtgtcgccgtcgatggcctggcggccgcacataatgatgtcatcctgctccacgccgatgcggttgatcgccgcggcgaggatctgggaggtggcgtaggtgtcggagccgccgaattcgcggccggaaacgagcaccgcttcgtccgcgccgcgggcaagcagctcacgcagcatgccttccgccggcggggggcccatcgtcacgacgacgaccttgcagcccgtctcttccttgagcgtgagggccgcttctacagcgttgaggtcgtccgggttggtgatggtctgcatggacgcgcggtccagcgtaccgtcagggttcacagcgacctttccggaggtatcgggaacctgcttcacacaaacgatgatcttcattttaaccatacctccttcttacttcacgccgaggttgctcgcgatgaccatgcgctggacttcgctcgttccctcgtagatctcggtaatcttcgcgtcgcgcatcatgcgctccacgggatattcacgggtgtagccatagccgccgaagagctgcacagcgcggcgcgtcacgtcgctcgccgcctcggccgcaaagagcttcgccatcgccgcatccatggaataagcgggagccttcttgccggcgagcgcggcttcggtgaacgcctgcttcttcatcgcggcggaatacacaaggaactgcgcggcctgcatgcgggtgtgcatatccgcaagctggaactgcgtgttctgcatctgggaaaggcgcttgccaaactgcttgcgctcctggacgtacttgatcgtctcctccacagcgccctcgccgatgccgagcgcctgcgaggcgatgccgatgcggccgccgtcgagcgtcttcatcgcaatgccaaagcccttgccctctttgccgagcaggttttccttggggacgatgcagttttccataatgagctcgcaggtagcgctgccgcggatgcccatcttcttctccttcttgccgacggagaagcccgggaagtccttctcgacgatgaacgccgaaatgcccttgttgccggcctttttatcggtcatggcaaagatgatgtaaacgctcgcatagcctgcgttggtgatgaagatcttcgtgccgttgagcacgtagtggtcgtccacaagctctgcggtggtctgctggccggaagcgtccgtacccgcgttgggctcggtgaggccgaacgcgccaagccattcgccggaaaggagcttaggcaggtacttcatcttctgctcctcggtgccgttctcatagatcggcgcgcagcagagggaggtgtgtgcggaaacgatgacgcccgtggtgccgcatgccttggaaagttcttccacggccatgacgtacgcaagcacgtcgccgcccgccccgccatactttttcgggaacggaatgcccaggaagccgtaacgcgcaagtttcttgacggtttccaccgggaagcgttcctcctcgtcgacttcctcggcgaggggcttgacctcgttctccgcgaatgcgcgatacatgtcgcgcagcagcagatgctgtttggaaagcgtgaaatccatagttcctcctattaatgtaaggggtttcccctttgcttactgcttgttgtaaacataaaagccgcggccggccttgcggccgagcagcccgccgcgcacatatttgcgcagcagcggatgcgcgcggtatttgctgtcgtgcgtctcttcaaagagcgtatccatgatggcgagaaccacgtcaaggccgatgaggtcgcccagctcgagcgggcccatcggatggttgcagccaaggcgcatagccgcatcgatcccctccgcggaggcgatgccttccgcgtaaaggccaacggcctcgttgatcatggggatgaggatacggttcaccacgaagcccgggcattcctgcacctccaccggctctttgccaatggcccgcgcaaggcgctctgccgtggcgaacgtctccgccgatgtaccgacgccccggatgatctccacgagcttcatcaccgtcgccgggttgaagaaatgcatgccgatgacgcggtccggccgcttcgtcgcggatgcgatgtccgtaatggagatggacgaggtgttgcttgcgaagatcgtctccgccgggcagatgccgtccagctcccggaatacgcttttcttcacgtccgcccgctcaacgatcgcctcaatgacgagcgccgcttccctggcgggtgcgagctccgtcgtaaacgcgatgcgggaaaggattgcgtccgcgtcctcccgtgcgagtttgccgcgcgcgacgcgcttatcgagcccacccgcaaggcgcgcctgcgcgcgcgcaaggatctcgtcgttcacgtcgcgcactgcgacgtggtagcccgcctgcgcgaacgcctgggcaatgtcgaggcccatcgtgcctgcgccagtcacaaagatctgttccatggttactcccctttaaagttctcgcgcggcttcttttccaaaaaggcgcgcatagccatcttttgatcctccgtgttgaaacagaaggagaacaattcttcttccgtcgcaagatccacatcaataaagcggtccacacgcgtgctgatcgcgcgcttgcaggcctgcaccgcaatgggcgcgttgcccgcgatctgcgcggccatttccatggctcgatccatcagctccgcgtccgggtacaccgcgttcacgaggcggatgcgcagcgcctccgaagccgggatcggcttgccggtgaggatgagctgcatcgcataggatgcgccgatcacacgcggcagccgctgcgtgccgccgaagcccggcgtgatgccgagcgtcacctccggctggcccagcttcgcgccctccgcggcaaggcggatgtcgcagcaaagagcaagctccagcccgccgccgagcgcatagccgttgatcgctgcgatgacggggacgcgcaggtcgtcaagcgccttaaacgcgcggtgcgcaacggccgcgaagcgcttcgcgccccttgcgtccaagccggccatctcgccgatgtccgcacccgcgatgaacgccttttcccccatgcccgtgatgatgagcacgcggatggaatcgtccatttcgatctcgcgcagcgcctgctccagttcgatcagcgtttcggtgttgagcgcgttgagcgcgcgcggccggttcacggtgagcacgacggctgcgccgtgccgctccacgagaatattctttctcatattctccatctggttcaaacctccttgcggttataaacagctcaatttggctggcctcccggccttcctaagctatgatatagcattttgcgctgaaagtctcccgttattttaataacgcgcaaggaggtttattttttcacatagcacgctgggcaggcttacttgcccatgccgcgcttgaccatttcctccaccgcgaaggaggcgacgtcgtccgcatacttctgcgggccgaagcctgcgtcgtagccgagttccttggcaagctcgtgcgtgatgcgcgcgccgccgcagatgacgatgaagcggtcgcgcacgccctcggcctccagcagctcgatgagctcggtgaggttctggatgtgcacgtccttctgggtgacggtctgggaaacgaggagcacgtccgcgttgagctccacagctttcttgacgaattcctcgttgggaacctgcgcgcccaggttgtaggcttcgatcatctcatagcgctcgaggccgtaatggcccgcgaagcccttgcggttcatgatcgcgtcgatgcccacggtgtgcgcgtcggtgccggtagaagcgccgaccatcacgaccttgcggccgatgtgctcgcggatatactcgttgcactcctccatctccatcgtggtcgtttccacggcctgcacatggatgtcggtgtaatccaccgtgtgggagcaggagccatacaccacgtagaaggtgtactccgcgtcgaggctctggttgaacgcgacggaaggctccataaggcccatcttcttggcgagaatgcgtgcggcctcggtacccttatcgtcgtttttcaccggcagggtgaagctcatctgcaccttgccgtcgttcatcgtgtcgccgtagggcttgagcttggtcaggtccagcgttttatcaaaatctgctttatgggtgttatacaatccgctgctcatttacttgtcccccttcatcagctcaataaacgggttgaagtagcagtcgtccttctgcacgacgcccgcaaggcccttgccaccgtcgcgggagcgcttgatgtccgcgaacgtgccgcgctcaagcgtgccgaaaaggccgatgtcttccatctcgcccaagagattcgtcgccttggtgagcacctcgttggcgcgcgtctgcatgatgccgccatccttgaacacgagctcgttgccgagatcctgcatggtgcggaagatgtactgcgcgttttcgatggaaagcgcgcggtcgctcatgaacggggtgtggatcgcctcggtgagcatgcccaggaggtgcagcttctggccggtgaggatcgtcaccatgttgaagagcgcgtcctgcacatggccgcggaagatgttgccggtcatgaacttcgtaggcggcatgtacttgagcggcgcgttggggaagatctcgcgcgccatctgcgcctgggcgagttcatagaggaagccgttctccacgtccggggagatctcgaacgcgtggccaaggcccatctgctcctcgggcatgcccgcgcagactgcgaactgttcgttgaggaactgggaagcaagcactgtatgcgcctcttccacggcgtctgctgtggtgaggtagttgtcctcgccggtgttgatgatgacgcccgcgaaggaattgatcacgcgggagaagtattggtcgatgatcgtgcgctgggggttaatgtcacggaagaggatgccgtagagcgcgtcgttgagcatcacgtccaggcgttccaaggcgcccatcgccgcgatttccggcatgcacaggccggagcagtagttgcacaggcggatgtagcgtttttcttccttgccgacctcgtcgagcgccgcgcgcatcaggcggaagttctcctgggtggcgtaggtgccgccgaagccttccgtcgtcgcgccatagggcacgtagtcgaggagggattgtcccgtcgtgcgaatgacggcgatgatatccgcgccctgcttggccgcggccttcgcctgcacgatgtcctcatagatgttgcccgtcgctacgatgacgtaaagatacgggccttccttgtcgccgaattcgcggaggaattcgttgcgctcggccacgttcttgcggatgcgcgccacggtggcttccgctacgggcatgatcgccgcgcggatctctgcagcgctgtgcgcggggagcttggtcaggtcaagttcgcccttgtcgatcgcctcggcgatggcctgcggatccttgccggtttccgcaatggcattgccaatataataggccgcgccgccggcgagcacgccgcggtcaaacagatgatccaccaccacgttgggcagcgggacgtccatctcgttcacattgtcgatgccgagcaggcgacaaaccgcgcgctcgacggtgacggtcgtatgcacgtcgataaagctctgcgtgtcggccgcgatatgcgccgcacttgcccgcgctttgtcgacgagttcccggttcaggttcagtttgctctgcatgttaatcacctttcttcggaaattgtggctgccggcaaaggccggcaaaggcacaaaaacgcgcgtgaaaaatcgctttttcgcgctgccgttcccctgatgaaagcggcgcagcggggatgctgcccgcacccccgcgccgtgccgccggaacttttacttctgcttctgcctgtcggcatagcgatccttgcgcagcagcttcgtcggctcgaggtacttctgctcgatgccatgggcgatgccggcaacgccggtgatctcggccgccttgcgcttgccttcgcagacctcgcagtggcactcgttcgcatagtgctcaggctcggtgtaagtggtgataacgccctcaaagttgcgcaggatcaccttgcgcggcgtctggctgatgacgtactgcggcatgaccggggtcttgccgccgccgcccggcgcgtcgaccacgaaggtcgggatgcagaagccgctggtgtggccgcgcagtgcctccatgatttcgatgcccttggagaccggcgtgcggaagtgggaaaggccgagggacgggtcgcaggcatagatgtaatacgggcggacgcggatgcgcacaagctcgttgacgagcttcttcatcacgtatacgcagtcgttgacgccagcaaggagcacgctctggttgccgagcggcacgcccgcgtcagccagcatcgcggtcgcgcgcgcggcttcctcggtgatctcattggggtggttgaagtgggtgttgagccacacgggatggtgcttcttcaggatcgcgcacagctccggcgtaatgcgctgcggcatgacgaccggcgtgcgggagccgaggcggacgatctccacatgggggatcttgcgcagctcagtcatgatgtaatcgagcatctcgtcgctctgcatcaggcagtcgccgccggaaagcagcacgtcgcgcacctcgggatggttgcgcacatagtcgatgcaggtgtcgatctggttcttggggacggcgcagtcatgctggccggcaaagcgcctgcgggtgcagtggcggcagtacatggagcactggtcggtgatgagcagcagcacgcggtccggatagcggtgcgtaaggcccgggcagggggagtcgatgtcctcatgcagcgggtcagcgtcttcatagggcgcaaaatgcagctcggcatccgtcgggatcgcctgcttgcggatcgggtcatggggatcgtcgaggtcgatcagggaaagatagtacggcgtgatggccatgcgcagcttgccaagcgtcgctttcacgccctcttcctcctcgggagtcaggggcatatgctttttgaggtcttccagcgtttcgatgcggttttcgacttgccaatgccagtcgttccactgggcatcgggcacgtccttaaacatgccgttggctctgctctgtctcat

SEQ ID NO: 28 - DNA, 7841 bp, unidentified
  source 1..7841: mol_type = unassigned DNA
aatctgatgacagttcatgtaagcaaatccgtgacagttcatgaggtcagtaacaacctccctggaacttcctctgtaaaatcgttgaaaaattttgtgatactcattctgcggaataccgattccctgatcctcaatttccattcttacaagatcgtttcttttttgtaaccggataaatatttttgaaccatccggactgtacttgaccgcattatctaaaacgttgatcacagcttcaccaagccaccttttatcctgcataatcgtgcatgtttccagctcttttgcatagtcaaaaacgaattcaatttctttctcatccgctttaggataagtgcggttcacagcagatatgacagtatccataagcggaagttttttcttattaatctgaatcagtccagtttccatcttggatatttcaagaagcgactgcaataatgtctccagtccatccagagcactccgacaacggatacgaaactcctcctgttctgtggcacttaagtcattctgcatcagcacactaaaacatgtatccaaagctgcaaccggtgtctttaactggtgagagatatcagaaaccatttctttcgtgctctctttttcttcccgtgcttcttcctttagcaactgaatatgatgtccgattgcttcaagctggtcattcaatttttccagttctgtgtgattttccgttttcagtaaatcatcaaatttattttcacggaatctgatcagaatttcttccaactggtctaaaattttctgatgacacgcatcttcttttttcttccaataaaataaaaaagtcaaaagaagcacgcatatcacagtgcttacagcaccggtcaccataacctgatgccggaattgcgaataaaatgcattccctttattcccccagtatccatattgctccaataatcgccttccctgttcgttagtttcaatatccttatccttaagcaattccgaaacagcatccagcccggaaaattcttcctttgcagcaatctctgtcataagattcattttatatttataatcttcataaaacacatacgtggtaaagcaatttaatattgtaaacaataatatgacaggtaataccaaggagagcactactgtaatcttcttgcgatatctctttgtcactgccttacctcctgattccatatatacccaagacctctgatattctttatatagaccggtgcagccggattgtcttcgattttctcacggagtcttctgatattgacagcgattgtattttcatccacaaaatccccttccagatcaaacacattttccaatatttgtgtttttgaaagaatctgtttcggattctgaagaaaaaaagtcagcattttcaactccgtttttgtcagactgatttcacgactctttatcaggactttcatttctcctgcgataaatacgatatctcccgaaatcatctttccggcttccgttttctcctgtctgcggcggaaatgtgcttctattttcaaaagaagtaccgaaagactaaacggctttgtaatataatcatctgcccctgcttcatatcccatgacctgatccatctcctgatctagtgctgtaagacaaataatgtatgtattataattgcatctcatccaccttacaaattccagtccattcccatccggaagattcacatcacaaatggtaacatccacatgattatcacttgcaattcttttcgcttttttcactgattctgctgaaaaaacctcatatccggattttttcagtgaaaatgtaattccacgatttaaattttcatcatcttcaaccacgagtatacctggcatagcatatgcacctctctttattaactatatatatcagctgggagatgactcccacctctataggtggtgagaaacaagcttgtatctccaaaagataaaataatggaactatcgtcagcactgttatcctctgaaaggagtcgtcaaatatgcttttgctttttcaatgccggaagtgtggcaagttcttctgtcggagtaagcattatacagcgtctgtttccaatatatgctgtgtgaaaatcataactccctgcaatataaacaggcaaagaatcctgatgattccctgcttcatattttatagaaattccgaatacgcttgtaaggatatttcttattccccttttaacttaatttctttcattttaacttagtgctgttaaaagtcaagttttttgagttattttaagtttatgcagacagtcgcacaaactcatttttctcattcaaaagcagatttctgtgaaatgcttccagatactctgtcgtttcgtgaatacctttttgcagattcgtatagtttccgcggacaagtgcatttctgaaataaaaaaacgcctgctccggttaggaaacagacggcaaatcaacgtttagatttgatggttttcatttccaccagttacgtcacacttacaccagcaacctgctttccaatggggctgctccgaaagatgtacaggaactgttaggacactctgatgtcagtaccacaatgaatatttatgctcactcaacaagaaaagcaaagcgagattccgcaagacttcttgataaagtagcgagcaatgcttaaataaaaatccatgttccttaaattggaacatggattttgtggtaatggggtaattaataatttatatttcacatgccacatcatatgctgatttaatagcatgatcaatattacttggacgttctccagcacaatcaccaatatagtgaagtggaagaggacaatcagaaagctctggaaggttctttcttgcaccaacagccattacaacaaagtctgaagcaatttcttctgttgatgtattgtcgtctattgttttttcaacaactacagaatcatctttgatttctgataattttgcagatgttactatttgaacattataatgctctaattcactcattagagtaggtagaacagtgttgctttcttcttttgcaatctggtccatcatttcaataattgtaaccttacatccacgtgaagccagatattcagctgtctcaacacctacaagaccaccaccgattacagaaacattaccgaatacgatttctttcttggcaagcacatcccatgcacttgtaacagttggaagatctttgccaggaacagggattattgcgttgttcgcacctgttgccacaattacttcatcgaatgaattataatcctgtgatgtgaattcttcacctagcctgaatgtaacatctaattcaggaagtacatttgcataataattaatacttctcatcatttcttcttttcttggaggtacactagcaataagtaactgaccaccaatctgaagtgatttctcaaaaatggttacactatgacctcttaatgcagcaacacgtgcagcttcaagtccagcaataccagcaccaataatagctattttctttgatgatgctgcaggagttatatgtcgtgttgcttcgtaaccgttttcagcattaagtacacaacttaagaacgcacgattctgaatattatctgtacatcccttattgcacatcatacatgttctgacattacagcaatgtccatctgcgcatttgtttgcaaagtcagggtctgtgagaagagaacgacctaatccaatgatatcagcagaaccatttgcaataactgcttcggcagcttctggtgtaacgatacggcctactacagatacaggaatagatacaagctcttttatttttttagaataagaaaccataaatccgtatggctgtgttcccatggcagggattgtatcacccatatttcctgtatggttagcctgtgcaacatgtaatgtgtcaacaccgcaagcttctaattcttttgcaaaaatgcaagcctcatcaaatggaagaccaccttttcctctaaaactattttctccaagaggagtaactataggaagcttgtagtcgataaccatgtcaggtacgattgtttttaatctttttacaagtgttaatgcaaaacgtgtacgattagccaggtcaccgccatattcatcagttctatgatttaaaataggagagcagagagaaccaacaagacggtctccatgtacttcaatacaatcaacaccagcttcgtgtgctaagatagcacagttttccatatgctttattatttcatcaagttcttctgcagttacttcatttacaaagtgctgcatatcatggtgaagtttagctcttgcttcctgcattttgccctgatggaacatatcgtttaaagctttgacattgtagtcaggatggaataactgaattccaagctttgcaccattttcatgacatgcgtcagcaagttttttgaagctttgaacctgctcatgtgaataaagctttggtgtaggagagaatgttggaagtggtgcaacatctccaattactatatatccgacaccgccttttgcgagacgctcgtaaaaacgaaaactttgttctccaattgaaccatctttttcctcatatcctgttgtaagtggtgggaacataatacggtttttaaactcaatatttccaacttttataggctctaataatttcattgttcatacttcctttcaaagtgagtatactatttaagtggtgttaaaaactctaacattaatttgtctaattctgctcttgcaaaagcactggcaaaattgtggttagcgccttcaatcgttttataattgcattttccattgtaaagtgactcatatctatggcatgttgcatcatctaccaaatcatctgcagttcctcttataaggaggactggtccgttgtatccttctgctgacgagaatggctcataattaaataaatcatgattaaaggatgttgggaaagtgagtccttcaatatcggccttggtgattccctgagcttccatggcttcagcacgatccttacatccaaaccacattccagcacctggacacataagcatgagagcataaggattaacaataggagcggcagtagcagctgcgtatcctcccatactctgaccagataagataatcttatctggattggcaaaatcttgtgttttagtccagtttataatatcctcgatatcgtgtaggatacctgtaaaggtcatgtcctcgaattcaccatcactttcaccatttccgtataaatcaaaacggacactggcaaatccatgttcagctaagaatctggctgtgtgagtataaatacttttgtaaccgcttttattccctgtaaagccatgtacatttacaatagcaggaaatcttgtgccatcttctggaatgttaactattccgcgtaagatgtgtccatcacggtttgtgatttctacttgttttgtcaatttaaaatacctccgtttctaattttattctgcagtagcagcatttcgcttgtcagctaaatcctgtaacatttcagctgttttctcttttgtaagagggtagataaattttaataccagaacagctaataaatatcctacaacatataaacctgtatatgttttccaaagacgtcctgagaatgcttcattctggacagcttcattaacctggaatccagcaattgcaagtgcaaaactactcatacttcctgatacagcattagcaagtttacggaagaatgtatatgctgagtatacaattccttcattacgttttcctgtctgaagttcctgataatcaattgcatcatttacaagtgcccaaactaatacttggaaaccacttactccaagatagcagattccgttgatgataataaagagcataggattttcaagtgggaagaagaataaaatagcataaacaacaactgagaaagttgcactgtacataatccattctttctttccaaatttcttagcaacaaattttgtgcctacgaatgcaataagtgaccagattacacttaacatacctgaaactgccatgatggcaacatttccaaaataatcgcggaataaataagtatttaatccgttaaccatacctgctccaacaataccgataaagcttgataacataactccgagtaatgctttgtttttagtaatatctttaattacctggaagtagttaagcttttcttttttctcaacaactggctctgtaataatacgctctttacaccaatgagatgtaaacataagacagattaatccaataactgcacagattgctgacataataaggaaatggctaggtactggctggttatctttatataagaataatggtccagcaataacgataactgtcataaaaattgtaccgccaagacttctgaaacgagaaaggtcagtacgttggttaacatcatcagtcattacacttgaaagactaccaaatggaacgctgacacatgtgtacataatttcgtaaacaatatatgtaatgaacatataagcaatacgtgcaccataagcgaaattgcttacgttaacaaatcctaatatacagagtactgcagttggaaaagcaaagaatttaatccaaggaataaattttccttttcctttgtttttgtggctatcaacaagtgcaccaattaaagggtcatttatagcatcccaaaactttgtaataagcataaggattcctacgtgtactggattaacttttaataccagtgtataaaaaatagcaagatacatggcacggaactgctcagtacagcaacatcccaaatcgccaagagtgtaaccaattttgtccttcatggaaaaaggtcttgtttctttcatgataatttacctcccaaatttatattgttttggtagctacaatcttattatattgtggttatgctgatatccatatacaaatattgcttgcaaactacgaaaaattgatatattgtatattttgacaaaatgaacaaaaaatataataggaaagtgtgcaaaatagacatatgaaaaagcaaggctacaaaatggaatatttgaaaatattggatagtacccagcgaagctttgggcaaaagaagagctatacaattgtatttatagctggtgggatagggtatatgcaccaggaggatgataatattgtatgtactatggaggatttgatatttattaagccaggtaataaagtaaagcttgaatatcgtaaaaataagtatcctcttgaagtttatgttctttatataggtgaagaacttttaaggaaattgtcagatgaagaaacaagacttgatgaagcgtttgattttgttccgtatcaagttaagattgttcattctgagagtgaatcggctatgcttataaagaatatatccaaaaagctctattcgatgaataatgagccgcctaaatttgcccgctcattatacgagaaaagcctattaactatgattcttgtacttgcacttcgctcatctgttcaggaggatgtacagattaagacgaataagaaaaaacacgttgtaatggatgatatttttatttatatcagagaacatttgacagaagatatctcgttggagcgcttggaaaatgaattttatgtaagccgttatcatatagtaagagagtttaaaaaaatgacaggtgagacacctcattcatacattgtaaagagcagacttgatttatgccgccattatatagagcaggggaaaagtattcgtgaggtatatgcgcttggtggatttggagggtataatcatttttttagagcatttaagaaagaatatggtgttactccaatgcaatattacaataatttacagattgacaggaatgaaaagtaa

SEQ ID NO: 29 - DNA, 5387 bp, unidentified
  source 1..5387: mol_type = unassigned DNA
ttagttcacaccaagatacttggcaacgaccatacgctggacttcggaagtgccctcgtagatctcggtgatcttggcatcgcgcatcatgcgctcaacgggatactcacgggtgtagccatagccgccgaagagctgaacagcgcggcgggtgacgtcggaagcggtctcggccgcgaagagcttggccatggcagcgtccatggagtaatcctcgtgattctgcttcttcatagcggcagcgtaaacgaggtactgggcagcctgagtgcgggtgtgcatgtcggccagctggaactgggtgttctggaactggctcaggcggcgaccaaactggatacgctccttggtgtacttgacagcctcgttgatggcgccttcggcaagaccgagagcctgggaggcgataccgatacggccgccgtcgagggtcttcatggcgatcttgaagccttcgccttccttaccgagcaggttctccttggggacgacgcagtcttcgaagacgaggtcgcaggtagagctgccgcggatacccatcttcttctcgtgcttaccggtggagaagccggggaagtccttctcaacgatgaaggcggtgataccgtggttgcccttgctcttgtcggtcatggcgaacacgacgaaagtggaggcaacgttaccgttggtgatgaagcacttgctgccgttgaggacgtagtcgccgttctcgttcttgacagcggtggtctgctggccggaggcgtcggtaccggcgccgggctcggtcagaccgaacgcgccgatcttgcggccggacagaaggtcaggcagatacttcatcttctgctcctcggtgccgttctcgaaaatgggagcgcagcagagggaggtgtgggcggaaacgataacagcggtggtgccgcaaaccttagcgagctcctccacgcacatggcataactgagaacatcgccgccggcgccgccgtactgcttcgggaagtaaatacccatcatgccgagcttggccatcttttcgacggtctccatggggaagcgctcttcctcatcgagttcctcagctaaaggcttgacttcattttctgcaaattcgcgatacattttgcggaccagcagatgttctttggacagatggaaatccatagtcttttgctccttcactataaaaataattggattgtctaatttttcacaaatcagttccgtgactctcattatatcctgtgcgtttcattttcgcaaggggaactatcattcctttttggaattcgtgcttttcgccgaattcattaaagtctttttgacatttccgttccttttatgacagttttctgtcattttcaggaatcctttccattccaaaagagaaaaagggaggcagtttttgtaaactgcctctcctttttatccttttagggacggattacttcttgctgtaatcgtagaagcccttgccggacttcttgccgagctggccgccgcggaccatcttcttgagcagcagagcgggacgatacttcggatcgccggtctcgctgtagaggacgttcataatggcgaggcacacgtcaaggccgatgaagtcgcccagggcgagggggcccatggggtggttcgcaccgagcatcatggccttgtcgatatcctcgacagaggcaacgccggtctcgaccaggccgatggcctcgttgatcatcgggatcaggatcttgttgacgacgaagcccggagcctcagcgacctcgacaggctccttgccgatctccttggagaggttgtagatgaagtcgaaggtctcctgcgtggtgttggcgccgcggatgacctcaacgagcttcatgctgggcacggggttgaagaagtgcatgccgatgacggcgtgcttgaggccgagacccatctcggtgacagacagagaagaggtgttggtcgcgaagacggcgctctccttgcacatctcgtcgagctcgccgaggagctgacgcttggtgtccatgttctccgccacgcactcgatgacgaggtcggcgtccgccgcggcagacttctcctcgacgaggatgttgttcaggatggcgtccttggcctcttcggtcatcttgcccttctcgacgcgcttctgcagggaagcggcgagcttatccttgtggcgctgagcggaagcgacgctggaagcgtacatcagagcggtgtggcccttggccgcgaagacctgagcgatgccgctgcccatggtgccggcgccgaaaactgcaactttcattgtgtgtatcctcctacaatataaatagataattctatggaatcacttgttgataaagggctcgtgcttgcgcttttcgaggaaggcgcccatgccctcctgctggtcggcgctctggaagcaggagccgaaggccttctcctcgatcacgacggcgcggtcaatatcgacctgaagaccgtcgttgatggcctgcttggacgcgcgcaccgcgatgggcgcgttgccagcgatctggccggcgagcttttccgccgcggcgtagaggtcagaaagcggatagaccgcgttgacaaggccgatgcggtaggcctcgtccgccttgatgttgcgggcggtgtagatcatctgcttggccatgccggggccgacgaggcgggcaaggcgctgtgtgccgccaaagcccggcgtgatgccaaggcctgtctcgggctggccgaagacggcggtatcggagcagatgcggaaatcgcagctcatcgcgagctcgcagccgccgccgagggcatagccgcccaccgccgcgatcgtcgggatggggaacgcttcgagcttgcgcatgacgtcgttgccctgcttgccgaaggcctcggcctcctccttgctgagctccttcatctgcgcgatgtccgcgccggcgacaaaggacttctcgcccgcgccgcggacgatcaggcagcggatctcgcttaagtccaccgcgtcgagcgcggcatcgagatcggcgagcacctgagaattgagcgcgttgagcgccttttcgcggtcaatgatgagataggcaatgttgcccttgggttcatatttgacaaaagacatcgtgtgtctcctcctgtcttcttcaactgccccctattatatgggcggcaaggcatatttgcaagagaaaaatcacttttttcaaaaaagtttcacacttttccggtctcactgcaagaaacgctgcatttttaatgatcttttctcccaatgcagcaactcttgtataaaatttttaaaatgacttgtctcttgcaccaattttcgatatgataggctttaattataggaaaacgaggttcattctatgcgaatgcgcaaaaagaaaaacctgcttccccgcatggagcggtgcggggcgtatcagatcaaggacccctacgagcgcaagggccgctggcacgacttgatgcccgaggcgaaggagatccgcgtggaactcggctgcggcaagggccgcttcaccgtcgagacggccgcggcggagcccgacgtgctgctcatcgcggtcgaaaaggtgccagacgcgatggtcgtcgcgatggagcgcgcggcgaaggcagagctgcacaacgtcttcttcatcgacatcgacgccaaccagctgcctgagatttttaatcagggtgaggtcgaccgcatctatgtcaacttctgcgacccgtggcctcccaagcggcaggccaagcgccggctgacgcacggcaatttcttgaagctctaccgcaaggtgctcaaggacaacggccaaattcatttcaagaccgacaacgacccgctgtttgagtggtcaatcgaggagatcccgcagtttggcttcgaactctctgaggtcacacgcgatctgcatgcgaacggacagtgcggcgtgatgaccgactacgaggccaaattctatgccgagggcaagaacatcaaccgctgcgtcgccacgatgcagccgtgggaagagcccgaggaagaggatacgcccgaagaggcggacgaaacggctgaataaaaggaaggctttcagccttcctttttgctttcttccagatacggcgaatacatcatcaccgcgtcgttcacggcgacaggcgtctccgcgagcagcttgccctgcaaatcaaacgtctgccggtagagctcgttgtggcggatgtagccgccccagtactgcgcgcgcatctcgtggttgcgctcgacgacctcatagcgctcggtcggctcggcgctcacgcgccactcgccctcaaggtctgttttgccgacgcggacacgcatctgataggtgtcctgtgtgtcgttgcggatcatcaggtcaagataggggtaaaagcaggtcgcaccgctgccgaagggctgcgtgcggttcgcgtcgggaaagacgtcgtagccgtggcggtggcgctcgacgaccgtgagcggcgtgtgcagcgtcatccagtagatgaggtttgagagctggcagagcccgccgcccgtcgcggccagatacccgccgttgcgcaggatcatgccgggcagataccccttccccgccgtcggctttccgatgagataccagtagctcatcgtttcaccggggcgcagcaaaagcccgtcgagccgcgcacaggcgaggcggagattcgtcaccttgttgcgctggagctgcatgtcgacgtccttgagctttcgcatgagcggcgtatggtgggaaaccgcctgatatgctaagtcttccctgctgcgctcgcgcgcaaaatgcttccgcatcgaaagccatctgagttttcgctgcgcgctaaaatacgcgccgccgagcttcagccgcaaattagagcgttttttcggttcgcggacggtcatatgcttccctcccctgtttttctgcttttatagacgcaaaacggcgggaaaaagttccaacattttctcatttcaggctcatcacgtagatttgacacgggttccactcgtcccagagcgtcgggaatacctcaaactcgccaaaaccgagggcgagatagaagcggttcgtcgcgtcgtactcagggtacttccccaactgcacggtcttgacctgcaaaaacgagtagccaagctccttcgcccgctgcttcgctgcggcaaagagcatcttgccgacgccgcggcggtggtattctttcagcacgcccatgacatagagttccgccgtatccctccccgtttcggcaaggtaaaggaagccgacggcgttctcgccgtcaaacgcggcaaaaaacggctgctttgcgcttttctcgatgtattcctcgcgcgcctctggaatgccaaaccagtcgggcagcgattctaaaatcaagcgcgcgatgcgctgcttctcctctgccgctgtgatctctctaacttccat

SEQ ID NO: 30 - DNA, 10887 bp, unidentified
  source 1..10887: mol_type = unassigned DNA
  misc_difference 2390: note = a, c, g, or t
  misc_difference 2391: note = a, c, g, or t
  misc_difference 2392: note = a, c, g, or t
  misc_difference 2393: note = a, c, g, or t
  misc_difference 2394: note = a, c, g, or t
  misc_difference 2395: note = a, c, g, or t
  misc_difference 2396: note = a, c, g, or t
  misc_difference 2397: note = a, c, g, or t
  misc_difference 2398: note = a, c, g, or t
  misc_difference 2399: note = a, c, g, or t
  misc_difference 7329: note = a, c, g, or t
  misc_difference 7330: note = a, c, g, or t
  misc_difference 7331: note = a, c, g, or t
  misc_difference 7332: note = a, c, g, or t
  misc_difference 7333: note = a, c, g, or t
  misc_difference 7334: note = a, c, g, or t
  misc_difference 7335: note = a, c, g, or t
  misc_difference 7336: note = a, c, g, or t
  misc_difference 7337: note = a, c, g, or t
  misc_difference 7338: note = a, c, g, or t
  misc_difference 8311: note = a, c, g, or t
  misc_difference 8312: note = a, c, g, or t
  misc_difference 8313: note = a, c, g, or t
  misc_difference 8314: note = a, c, g, or t
  misc_difference 8315: note = a, c, g, or t
  misc_difference 8316: note = a, c, g, or t
  misc_difference 8317: note = a, c, g, or t
  misc_difference 8318: note = a, c, g, or t
  misc_difference 8319: note = a, c, g, or t
  misc_difference 8320: note = a, c, g, or t
ttcaaacaaagttatttggaaaagacacataagttctatgaaaagtatggcggtatcaaggagattaagattgcaaaccgcgaagagtttttcgagcgtgattttgagaaacagaatgagatctatacttatgttatcaaacagaactctttcttaagtgcactgccaaagccgatcattgaggcgcttgccatcgcgggtctgatgggaatgattattgtcaagatcgtgatgggaaacacgaacaatgcacactttatcgcagtgcttggtgtattcgcagtggcggcattcaagctgctgccttccgtcaataaaatttcttcctactatgcgtccattatccacaatggtgtcgtgatcgacaagatccgtgatgagtaccgtgatatagaggcgcaccgcgaggcacgtgccgaggcggaagcaagaaaagcagaggagatcccggtaaccctggagaaggaaatccgtgtggaacatatggagtttacttatccgaatgtggaggagccggtgctttccgatgtgaatgttacaatcccgaagaatgcgtcggtggcgttcattggaccgtccggagcaggaaagaccacgtttgtcgatctgatccttggtgttctgactccgcagaagggtgtcatcatgaccgatggtgtggatatccagaagggaatgcgcagctggcatgacaagatcggttatatcccgcagaccatctatatgcttgatgatacaatccgcaataacattgcatttggtgcgaatgaggacattgatgatgagcggatctgggaggcattaaagcaggcacagcttgacgatctggtacgtgagatggaggaaggtctggataccgtcatcggtgaggcgggtgtgcgcctttccggtggacagagacagagaatcggtatcgcgcgtgcactttaccgcagaccggaagttctggtgcttgacgaggcaacttctgcgcttgacaatgagacagaggcagctgttatggaagcaatcgacagcctgcagggcaagatgacgatgctgattattgcgcaccggctgtccacgatccgtaactgcaatattgtatataaggtagaaaatggtagcgtgacagtggatacacagcgccacaaccagtagaccggaggggatggaacgaacatgataatcatagaaccatgtgcaggactgggaaaccgcctgctggcactgacttcagcgtatgaattggcggagaagctgggaagggagctgcttgtcatctggaagagcgagataggctgccagatccggtcagaggagctgttcctgtttgatggggttaaggtgatcaatatcagtgagagtggatggaagcaggattttgccgggacactgcgcggcaatgccgtcaagaaaaaataccgtggcagcgcagaccggtttgtggagtgtgatgaggtagaggtctggaaaaaagagggtggatttgcgcgtgtggaacaggagattgcgaaaacgtcccggatctacatcaaatcctacacaaatctgtgcgagatcacgccggacagcttcaggttcttaacgccttccgctgcggtggaagcgcgtggcagagaagtgtttgcccggatcacaaaggagcggacggtgggggtacacatccgccgtaccgaccacacagatgcgatcgcaaacagcccgctggagttgtttaccgaccggatgaagcgcgagatagaggaaaaggatgccaatttttatgtgacgacggacgatgccagggtcatggacgagttaaagcaggcattttccgcagagcgtctggtaatctacgagaataaggtgcttgaccgtgattccagggagggcatacaggatgccctggtggatatgctgtgtctgtcaaagtgtagcaggatcataggaagctaccggagtacgttcagcctgatcccttcgatcatgggaaatattccgctagagatgatgataaaggattgagaaaatgaaaacgtgtacgatattaggaacagagattgccgtcacgacgatggaagagacggttcgctatatagaggaacacatggaggaactgcgcgggaaatatatctgcgtctcgaatgtgcacacgacggtaacggcatatgaggatgaaagctatcgcaaagtgcagaatggtgccgcatttgccctgccggatggaaaaccgttgtctctttattcaaaaaagcacggattcccggaggcggaacgtgtgaccggaccggatctgatgggagaactgttcgcgagagacaatgggctgactcactatttttacggggggagtgaggcgacgatcaggacactgcgtgagaagcttcccaaagaatatccacatcttaagattgcaggaatggtgtcgnnnnnnnnnngcgccgatgtggatgcagaagttgagcttagagtggttataccgtctgatgcaggatcccaagcgcctgttcaaacgctattttgtgacaaatttcaagttcctgcggctgacacttggaagagggaagaagagcagaggagagaaaaagtcatgacagaggcgaaggcaaagtaccaatacatggatgtggcacgggggctggcattgctgttggtcatgatctcacatgcgcacggactcagcagttttctgatcttttactatatccagatctttttcatcatctcgggctatatttataagcctgggcggagttacagggacaatatccggcgcaaggcaaaacgccttcttgtgccttattttggttacagtgcactgctgtggtgtgcgtatgccctgatccgccgggatatgggagagatgaaacagtcgctgtttggcattttttattcgaggttctgcctgtacaaaaatgcaacgcacacagagaatgtctatctgctggatattgccaacggagcgatgtggtatctgactgcattttttgtgacctgtctgctgttttatctgatcgcagacaagtgtcttgcaagtgcaaagacgatggcggtcacatcggtcgtgcttgttgccgtgacgatggcattaaacgaactgcccattcttcttccgtggagtatggatattgtgccggttgcggcactgctcatgctggtgggagcgtggatgcgcagatatgagttttttgagagaaaatggaatccgctgtggatttttgtgacactggcagtctatgtgggaacggttgtattcaacggcagattaaatatgtccatccgcgagtatggacggtttgacagtttcagcgtacctttttttcttgtaatctcgctgaccggatcaaccttatgtatctggttttgtaaatggatcgggcacacgaaggtagggagcggtctggcatacattggcaatcatacgatcgagttgatgtgcctgcatatgttcggtcttgagatgtttgaggtaatcgcgtcgcatgtcatcccggtacaggaactgacaggagtggcggagtggatttatgtagcagtgcgcgttggcgcagcggtctgcggctccctgctgtttggtgtgggtgtgtcgtgggtcaaaaagaagagaggaaggtagcatggagaaaaaggaaagagattcaggtctggagcttttgcgcatcatcggattgttcctgatcttctggatgcatggggcgagcagttatgtaaacaattcgctgagtgcctggctgtgtattgtgattgagacaatcggaaatgtcggggttccggtctttatcctgatttcaggatatttcgggatccggttcaaacctaaaaaactcctgcagctggatctgatgctgatcttttactgctggaccggtcttgcgctgcgctttgcgtggggagatgccgcagagtatggaatggaacagattctctcctatgtacttccggtcattggtcgcaattcctggtattttacctgctactttgcactggcgattttaagtccgttcttaaacgaatttgtggaaaagctggagaaggagaccttccgcaggatgcttgtgctgatgttagtgatcttttcgggtatcacgacatttctctttttcgatatcacacaggatggcggaaagggaatcgtcaatatgaccctgttgtacctgatcgggcggtatatccgcctgtatcaggatgaaaaggtgtacagccggaaaaaactcatcacggcgtatgttgccatcatggcagtctgtattgcattaaacggggcactgtatgtggtgagtggtacggtgcagaatcggttttcgcgtgacaatacgctctttacgatcgcagcttcggtgtgcctgttcctgctttttaaggatctgcattttcgcagtaaggtgatcaaccgtctggcaacgcatgttccggcggtctttacgatggagtggacgctccgcggagtggtcacggcgtacatgttcgactatctggcgtggagggagagcaactggcatgagctgatcctctttggggtatgcttcctgctgcttgccatgggaaccgtgatcgatgaactgcgtgtactcctgctcgggcgggcagaggaaaagcttgcagatctggaataccggggacttaccaccgtctgcggtactctgaagcggtgcatccttcgatttttttaaaaactttattaaagtaactggcgtcatcaatgccacagtgctgtgcgatggtttcaatggaatcgttgctgtaacggagcagctctttggcattggtgattttttttgtcagcagatactggatgatcgttgttccgaattcttttttgaactccctggaaagatagtacttgctgatatagaactggtcggcaagctgatcgagggagatattttcggtatagtgttcgttgagatagcgaagaatatccttaagcttgacggacagcggggagtcatcggcggactcgcgtggcgcatctgtgcataaggtggtgaggatggatacgatctgtgcggcagtcagaaggtcggcatcgtccgtcttttcttcatgcagcgtaattacgttctggattgtggaggtgagttctgcgaggtggctgcttttaaaatgccagtcgtgctgctcgcggaaacagctgtagtatgcggctgcgtttggaccgtaaaaatggatccacagaagctcccaggggtccgcctcactgctgatgtgggtgtattcgccactgcaatctaaaaaaaagcagtcgccggcacgggcagcgacgcgggtcagaggatgtttggcgtcctgggggctgtcggatgcaggaaaaaggtgggagcctgcggtatcccggtaggagacactgccgctgccggagagtacgatcagaaagaggtaggaggagagaccgctccgccggcttaagtgcggccgcagactttttaagtaaccggcctcctggatgtagagaaagttgcttttgataaaagaagaaggggtattgataacacgtctggtgttggtgacctcggaggtcttatatttttcaaaaaaagagtcccgcatctgtattctcctaatttttgcgtatagcaatataatactatttttgggcaagatattcaatggaaaaaaaacgtggattagattattcttagtaacggctttcaacgcgcatattagcaaaataatcatagaacaaagaaaaaggagaatctagatgagtaaaaaagcattgatcacaggtgtgaccggacaggacggaagctaccttgcagagtttttgttagagaaggggtatgaggtacatggtatggtacgccgttcttccacagagaagagagagcgtatcgaccatttggagagcaacccgaacttccatgtacactacggcgatctgtccgattccatgagcatcatgcgcttagtgggcatgattaagccggatgagatctacaacctggcagcacagagccatgtaggtgtcagctttgatgtgccggaatacacagcagatgtagttgcaactggtgtgctccgcgttttagaggcagtccgtctctgtggtctggagaagacctgccgtatctatcaggcatccacatccgagttatacggaaaggtagaggaagttccgcagcgcgagacgacaccgttccacccgtacagcccgtatgcagtggcaaagcagtatggctactggatcgtaaaggagtaccgcgaagcatacaacatgttctgctgcagcggtatcttgttcaatcatgagtccgagcgccgcggtgagacatttgttaccagaaagatttctctggctgcagcaagaatcgcgcagggcaagcaggacaagctgtatcttggcaatctgtcttccttacgtgactggggttatgcaaaggattatgtagagtgcatgtggctgatcttacagcatgagaagccggaggatttcgtgatcgcaaccggtgtacagcattccgtaagagaattctgtgagtatgcattccgtgaggctggcattgaactggagttccagggagagggcatggatgaggtcggtatcgacaaggcaaccggcaaggtagtcattgaggtatccaaggagttctaccgcccgacggacgttgtcaacctgtggggagatccaaccaaggcaaagaccgagcttggctggaatccgaccaagacaacattcgaggagctggtaaagatcatggtaaagcatgacatggagcttgtggcaaaagaaaactaaaacaaatgtatgacgatacagtatttggcgtgccatggcaggattggggcacgccaagttgtggtaaaaaggagagaaagattatgatggaaaaagatgcaaaaatatacgtggcagggcacagaggaatggttggctcggcgatcgtgcgccagcttgagaaggaaggctatcacaacatcattacccggacacacaaggagttgaacctctgccgccaggatgatgtggaggaattttttgcaaaagagaagccggagtatgtcttccttgcagcggcaaaggttggcggtatcatggcgaacagcgaagctcttgccgattttatgtatgagaatatgacactggagatgaacgtgatccatgaggcatggaaaaatggctgcaagaagctgatgtttctcggatcttcctgcatttacccgcgtatggccccgcagccgatgaaggagagctgtcttctgaccggagaactggagaagaccaacgaggcatatgcactggcaaagatcagcggtttaaagtattgtgagtttttgaataagcagtacggcaccgattatatttctgttatgccgaccaacctctacggaccgaacgataactaccatccggagcacagccatgtccannnnnnnnnncacacagtcatgtgcttccggcgctgatccgccgtttccatgaggcgaaggtggcaggagccaaagaagtaacctgctggggaactggaacgccgctgcgtgagtttttgtatgtggatgatcttgcagatgcttgtgtattcctgatgaacaactacagtggtgatgagacggtcaaccttggaaccggcaaagaacttacaatcaaagaactcacagagcttgttgcaaaagtgatcggttataccggagagatcaagtgggatccgagcaagccggacggaacaccgagaaagcttctcgatgtcagcaagttagagagcctcggctggaaatacaagacggagcttgaggatggaatccgccttgcatacgatgatttcctgaataatccaatgagagccgagcgctagaggggagaaccatatgtatatagtattgttatcgggcggctccggaaagcgtctgtggccattgtccaacgatttatgttccaaacagtatatcaagctgatgaatcatgataatcaaaaggagacggcagaaaagtgttcgatgctgcagcgtgtgtttggccagcttaagaccgcgggactttccgacaacacgatcgtctgcgcgagcagtgcacaggtggagctgattgagagccagcttgacggggctgcagaggtggcagttgagccgatgcgccgtgacactttcccggctgttatgttatcctgtgcttatcttttgtctaaaaagggagcgaaggaggatgacgtcgttgcatttcttccggtcgacccgtacacgacaggagagttttttgaccggattaagcgtctgggagagtatattgcatccacagagaatacgattggactgctcggcggtgtaccgacgtatccatcaaccaaatacggctatatcgtgccggagaagagtgggcaggagctgcttaaggtcgaaggcttccgtgagaagccgnnnnnnnnnncgggatgaggcaactgcggagaaactggtcgcagacggggcgctctggaactgtggtgtgttttgtttccagttatccatggcagccggctggcttacaaagtatggtgttggcacggattatgaccagatggtcactgattatgagaagcttccgaagaaaagttttgactacgaggtgttagagcactgggagcgcattgttgcgattaaatatgcagatctgtggaaggatctgggtacatggaatacactgaccgaggaaatgccggagaacagcatcggtgatgtgacctgggatgatacctgcgagaacagccatgccatcaatgtgctcggcgtgccgatggttgtgatgggagcgaaaaatatggtgatcgcagcatcccatgatggtattctggtggcggacaagcatcagagctcctatatcaaggattgtctgacgaacattgcggacacttcaaagtatgaggagcgccgctggggtacgatcaagacgatcgacagtgatgaggatgacggcattaagagtgtgacaaggcgcatcaaggttgttgcaggcaagacgacaccggagcacaggcatctgtcccacacagagacaatcacggttctctccggaatgggaaaattgatcttagaaggtgtggaagtagatctgatggcaggagcgacagtcagcattgcagccggcaaacggcatgcaatcaaggctatgggttcggatctgcgctgtattgaggtgtcgatcggtacggacgagaagagtaccttggacgatgagattataggataaggacggcagaacgatgaatatattactgacatccgcgggaagacgcggttatcttgtcgaatacttcaagaaagcactagaggggatcggggaagtgcatgtgggaaacagcacaccggtttccccgagcttttactatgcagatcatgcagttgtgacccctctgatttacgatgaggcatatattccgtttttgctggattactgcaaaaaaaaccacattgatgcggtactgtccttgtttgacgtggatctgtatatgctggcacagcacagggaagagtttgcaaaagaaggcatcagggtaattgtgtccgcaccggaggtgatccgtatctgcaacgataaatgggagacataccagttctgcaggaaaaacggttttctgacaccgaagacctggctgcatctttcggatgtgaaagctgcactggaggcgggggagatttcctatccggtcatcatcaagccgcgctggggcatgggatcgatcgccatctatcaggcagagaatgcagaggaactcgaggtattgaccaaaaaggtcacgcgggagattttccgctcctatctccggtatgaatcagcgttcgatgaggaggaatgtgtcctgttccaggagatgatccatggacaggagcacggactggatgtgatccacgatctggacggagcatggcagctgacggtcgtgcgtgagaagatcgccatgcgttcgggcgagacggactgtgcgagagtgctgtcggatgagaggattgcatcggtaggaactgctgtcggcaaggcgctgggacatatcggaaatctggatatggatgtgtttgtgaccaaagatgcggtctatgtacttgaactcaacgcgagatttggcgggggatatccgttttcccatctggcaggcgtcaatctgccgaaggcgattataaagtggctttcgggtgaggcacttacagatgaacttgtggtaaagaaaacaggtctttatgcacagaaggatatccgtatgatcgatatcacatcgtgtgtaaaagaagacggaaagtaaaagtatggaaaaagaaacaaaatatcaacagtcctatgtgacaccctgctatgagatcaatcttgagcagtttcacgaaaactgtgatgctgtgatgcagccgtttgaaaaagcatgggatggaaatgtggcatacggttactcggtaaagacaaaccatcacgaggcactgatgcgctatgccgcggatcatctgggatggtatattgagacggtttctgtgaatgaatacgagcaggccagacaactggtgcctgcggagcggatcatattcaatggaccgtgcaagcaggaacgtctgctcacagtctatgagcagggaggaatcctgaatctggataaccccacagaagtagaacagctgtgtgagacggtaagaaacggagctgttccatcagaacacacacaggtgggacttcggatcaattttgatctggaggcacagtgcccggatgagacaaccgctggtacagaggtcagtcgttttggcatctgctatgaaaatggtgatcttaagcgtgccatagaccagcttggggaggcgggtattgccattgacggcatccatctgcacaccagcacaaagaccagaagcacccgtgtttttgcggcattggcagggatggcggtgaagatccgggaggaatatggactgtccttaagttatgtggatatgggaggcggctattttggcggacagaaggtcaccggaaagccgacg

SEQ ID NO: 31 - DNA, 9669 bp, unidentified
  source 1..9669: mol_type = unassigned DNA
atgtgtggaattattggatttacaggtaaattaaaagctcaggatgtcttattgacaggacttgcaagccttgagtaccgtggatatgacagtgcgggaattgcatactttaaagataccggaaaaatttcacttcggaaaactgtcggaaaagtaaaagatcttcgtgcaatctgcgatgatgataacaattctacgtgtggaatcggccacacccgctgggcaacccatggtggcgttaccaatgccaatgcacaccctcataaggtcggacaggttgcattgatccacaatggtatcatcgagaactatcatgatctcgccaccaaatatgatctgacggatgaactgatttccgagacggataccgaagttgccgccgcattgatcaataaactctacgaaggagacccaaaagaagctcttcgcaaagcagtagccgaaattgaaggttcctttgccttctgcgttctgttcaaggatcatcctggtgaaatttatgcggtaagaaatgtcagccctatggttgcaacatactgtgatgacggtgcttttattgcatccgatctgactgcttttatcgcatacaacaagcgttatttcatcgtgccggaatatcatattttaactatgaccgcggacggcattacgttagaagatttagacggtcattccgtagaaccggaatatatggaagtaaactgggatgttaccgcagcccagaaagatggttatccgcatttcatgatcaaagaaattcatgaacagccggctgccatcacaagaaccattaccccacgtatcaaagatatgcttccggatttttcggaagatgccattgcggattccttctttgaaaatgtaagcgacattacgatcgttgcctgtggtactgcaatgtacgcgggaatggtaggaaaaaccatgatccagaaccgcctgcatattccggttaccgtggcaatcgcatcggagttccgctatgaagaaccggtaatcaatgaaaaatccatggtgatcgtcgtatcccagtccggagaaaccattgataccttagaagctcttcgccttgcaaataaatatacaaagaaaacactgtctattgtaaatgtaaaaggctccagcattgcacgtgaaagcagctatgtattatatacacatgccggtccggaaatcgctgttgcaagtacaaaagcatacaccgttcaggttgcttctttttacctgcttgcatgcaaacttgccatgacacagcaaaagatttctgtcgaagaagcacgtacatttattggaacactgcaggaaattccaaattacatcgaggaagttcttgcacaggctcctgatattgaacagctgaccaaacgcatgatcaatgccaacaacgcgttctttatcggtcgtggactcgattataccctttgcatggaaggtgctttgaaattaaaggaaatttcttatattcatgccgaagcctatgctgccggtgaattaaaacacggaaccattgccctggtcagtgaaggggttcctgtcattgccgctgctacccagaaacatgtatacagcaaagttatttccaatatccgggaagtaaaagcccgtggtgcttatgtcattcttttgtccaaagacaaagaaatcacagatccttctatctgtgatgtacacatcaatcttccggatgtatccgacgaatttacgatttttgaatctgttgtaattttccagctgattgcatattacacatccgttggaaaaggcttaaatccggatcagccacgtaacctggcaaaatctgtaacggtagaataagaaaaaactgtcgcgcgaaaattcgtgcgacagtttttttgacatagagcctttctaaaacttttgaaggcaaaaaaagaaccccagaagctctctaaaagcctctgaggttgcccctgccaaggattctctcacccatgtaccggaatccttgtatcgtcggcgcgacaggatttgaacctgcgacctctgcgtcccgaacgcagcgctctaccaagctgagccacgcgccgtttcaactgcccaattatagtaacacattctccggtgtttgtctagtgaatttttttaatttatggtacaatacaaaaaaagaatggagaagaacaatgaaacatactgctttgattacaggtgcatcccgtggaatcggtgcagccctggcatgtcgatttgccgctgaaggctatcatctggctctttgctgccataactcttatgaaacgctgcaggcacttgccacaaaacttgaaacaacctgctccatacaggtgcttggcttccgtggtgatgtaggagactatacttttatctgtgacatggtgcaaaaaacactggataccttcggccagattgatgtgttaatcaacaatgccggcatctcttatatcggtctgctcaccgacatggatattaccgactggaaccggattgttgcgacaaacctcacatccgtcttttccacctgcagacaggtcatcccctccatggttcatgccaaatccggacatatcatcaatatttcttctgtatggggaaatgtcggagcttcctgcgaagttgcctattctgcatgcaaaggtggagttaattcccttacacgcgctttgggcaaagaacttgcccctagcaatatccaggtaaatgccatcgcctgtggggtaatcgatacggatatgaaccgttgtttctccgaggaagaacgctctgcactcatcgaagaaattcctgccggtcgtatgggatccccggaagaagttgcttcactggcatattctcttgccacagcaagcagttacctgaatggacagattctcaccttagacggcggatggatttaatttcttatctttttggaaatctttttccatttatttaagaattaaaacgcaatacgcgttttctctgttttttatatcaactttctataaaatcatttgtatgaaaacgaatgataaaaataaatacaaagattttggtgaccgtctgagtctgattatgtataaacaaaatatttccaatatccagctggcaaatgcaatgtttgtttcgccgtccacgatcagcggataccgtaccggtcgtcgttctccgaccgttgcggatcttgcagccatcgtgcagattctgaatgtttctgcagattacctcatcggaaccagtgaaattacaaccagacccgataccaccgaaaaaaatagttgagcacgccctgtttccagagcggtgcccaactcttttttataaatcatgttctgccagtaaaattaccgtagaacgttccggaacacgcacacgtgtctgatctccctgtgtctgggcttcaaaatctgccccatcctggtattcacagaaagtatttactacaagtttccaatgataagactccggcaacgaaggcaggcgcatctccaaaggctcccaatacgcattcattccgtaaaagatcatatcatcatccgtatcatcggcatttcttcccgcatacatgattccaattaaatgtgtattatagtccgtataattccggttcggctctccgttatggatacttacggaaggtaacccgcagactgccggctttgtatcccttcgcagaatcggatgctttgcacggaaatggatcataaaacgggcaaaatcatgaatctcctgaaattcttccagtctgttccagtccagccaggaaataatattatcctggcagtatgcgttgttatttccatactgcgtattacaaaattcatcccctgcaaaaaacatagccggtccacggctgcataacaacgcggcaaatgcattcttcacgagtctgcgccgcaggcccataaccaccggatcatccgtctcaccttccaccccgcagttccagctcaggccgttgttatccccgtccgtattgttccatccgtttttctcattatgcttttcattatatgaatacagatcatacaacgtgaacccatcatgacaggtcagaaaattgacggatgcactatatccgcggcttgccggatcatacatgtcggaggatccggtgatacgtgtaattgcacgccctgcgacgccactgtcgccctttaaaaagcttctcatatcatcacggtatcttccgttccattcggcccagcggttccaggacggaaaacttccaacctgatacaagccacccgcatcccaggcttctgcgatcagcttcatatcccccagaatagagtcaaatgcaagggcttccagaatcggcggattctccatcggtgcaccattctgatctcttcccagaatcgatgccagatcaaaccggaatccatccacccggtactctactgcccagtgccgcagacagtctgtgataaaccgccgtaccaccggatgattgcagtttaagacattgccacagccgctgaaattgtaataatatccatccggtgtaagcatataataaatattgttatcaatccccttaaagcaaaaacatggaccgttttcatttccctctgccgtatggttgaataccacatcaagaatgacttcaattccattttctttcagttcgcggatcagacgctttaattcatcaccctcatgattatgctcctgatgaaatgcataacttgtattcggggcaaaaaaggaaaccgtattatagccccagtaattgtacaactgcacgccatccaccacacgggcactttccatttcatcaaattcaaaaatcggcatgagttctaccgcattgattcccagatctttcaaatacggaattttctgtcgcagaccttcaaatgttcccccaccttttacaccggaggacgcatctttggtaaatcccctgacatgcatctcatagatcaccagatcttcaaatttgtaattcagattccgataccgcccccagtcaaaatcactttgcaccacacgggctttatagacaaaatcctttccgccttccggtttttctccccagtttctctgaccggtaacagctttcgcatatggatcaagaagcgtatgttttctgttaaacagtaaccctctcgcctgatcggcaggaccgtccatctgataggcatactcaaaatcctctgcttttaagccaaaaacaaggatagaatacgtatttccaattttataactttccggaatgcggattcttgcatacggttcctgtgccgccggccggaataacagcaggacacagctcgtagctccatgggagcttacggtaaaacttaccccttcctctgtctgatatgcaccattcatctgataaaatcccggacgtacatcaaatccaccgatattatcgagtggatgaatgacttccccgagactttccatttcttcgtctatcggccagcttttctgttttgacggataattccaaaaacttgcattcatgtgctgattcctcttatcattattatttacttgccacataaaattatagtatccccctactcttccctgatgattaccctgccatttgcgtcaaatccgattttactgtacttttccgaatactcattcatatgatcaataatcgtctgttttctgtcgccttttgctatggcaggctgaaaattatttctttctgatgtggaagaaatgctgcatggtatcatatcggctgatatatctgtctgcagtaccccatccacaaaggtaaaggtctgttcatagatcgccgtatctttgtcttttggattcctgttccccccaaagcagaaatttccaagactgtagcagatcatttttccgttgtataattccattccctgcaatacatgaggatgtgtaccgaccagcagatctgctccccagtcaatcacctggtgtgccagcttctgctgataatcattcggataatgatccccctctatcccccagtggcaacaggcaattaccagatccgctccttcttcccgaagttctgcaatcccatcccggatataattggcatgtttttcatctgcagacaactggcttgcggagacaattccgattttgataccatccttcgtggtataggtatccacatgatcattgaatccgaagataatccctgctttatttaacacttctctggtatcatcaagtccctgctgcccataatcaaacgtatgattatttcccagacttgccccctccacagaactgtctgtcataataccaacatactccggttttccttttaagttccacgttttttccacacgctcggtcgcatttgacaacacacattccagattgatcagtgtaaaatcatcctgctcaaaaatacttctgatatttttaaaaaaataatcctgcccgtatttatcatagtattcatgaaaggaacctgcatacccatgcgtctgtgttgccccaagcgtacagtcacctgtcgccgtaatttttaccgtctgtatcaccggttcctgctgcgtttcagttgcagtcccggtttccgtttcttccagcgtacccggttcttccgtcatctgtgtctccgtgattttttccgtagaagagggcaaagccgatgacgttgctgcaggagaagaacatcccgtcagcaaaaatcctgccattaggattggcaatatccattttttcatacgttttcagactcctctttcacaagaatatccaccgtgtgaccgcttgcacccataagatccatccgttcacaggttgccagatgatactgcagaaacgcatcaaactcttcttccgtcagcgcatttaaaaacggacgcatataatttgctgcaccgtctgccgctatgatctgccggcgcctgacctctacctgccggtccaatgcttcaatatcttccagacgaaccatggaatacagaggattggcttttgaagtacagtgataatcctctgtgagcattccctcctgaagtgcttcaagaatatgtttttccttaaacgcatacgtgataacggaaaattcattcataatatacgccacgagaatcctgcctccgggttttgtcaccctcactgcctcccgcagcgcagcaagcttgtccttttcctcatgcagatgatacatcggcccaaacaacagggttacgtcaaaggaatcatcggaaaattttttcagattcattgcatttccctgatatgcatgcacgcctgcacccttctgtttcaagcgtcccagattatgctttaccagttccacggccgtcacatcgaacccttcctgtgccagcggtacgctgtatcgtccggttcccgccccgatatcaaggatatgaatttcctcttttgcacgttctttcacaatttcatccagacactgatggatataatgcatacttgtcacaaattccaccctgccgtgtcggctgtccagacgcttctcttcattaaatttattataataggcttctaagtctgtcatattttaatactaacacattttctttaaaatttcactcacaatcgctgatgcgacatccgctttgctcattatttccagttccctgcagtcatctgccgtaatcagcgtcaccacattggtatctgtaccaaatccggctccggctaccttcaggttattcgccacaatcatatctgcattcttttttgcaagttttgcacgggaattctccagcatatgttccgtctccatggaaaatccacacagaaactgtcccggttttttgtgcgcgcccagatacgaaaggatatcttccgtgcgttccatcgtaagagtggcattcccgtcttttttcttgactttctcatcgaccgggtgatccggacgataatccgccacagctgccgctttgataataatatcctgttgctctgcggtctcctttacggctgctgccatatccgccgcagatacaaccggaacgacctttacaaacggcggcggagtgattgccaccggtcccgtgatcagcgtcacttccgcgccacggcgcatgcagttttccgcaattgcatagcccatttttccggtagagtgattcgtaatataacgcaccggatcaatcttctcctgtgtcggtcctgctgtgaccatcactttctttccaaccatgtccttttcgcaggcaagatctttcataatataagaaaacagtgtttccggctccggcatctttccggctccggtatccccgcaggcaagataaccactcgccggatcaatgatatgaaacccataatgctccagctttttgatgttatcctgtacgatcggattttcaaacatattggtattcatggcaggggaaacatacttcgggcattttgccgcaagaatcgttgttgtcagcatatcatctgcgattccgtttgccatcttgccgatcacattggcagaagccggcgccaccataaaaatatctgcacgctttgccagtgccacatgctcgacattgaactggaaattccggtcaaatgtatcgaccagacacttgttgcttgtgagcgtctcaaacgtgataggattaataaaattggttgcattttccgtcatgatcacatgcacatccgcatgctgcttgacgagcgcacttgccagataggcgattttataggcagcgatacttccggtcacaccgagtaccacacattttccttttaacattgtctcttactcctttgcagaaaaaatcacatcttctgctattttatcacactttttccctaaaacaattgaatttttgtcatctgttccagtatggaatctttgacagaatcgttcagatatgctggatttaattttctttttgcatatgcaaggtaagaaccatttgtctcttcaatcaaaactgccgtaaaaaaccgctcccagctaaaatatgttttgctttccacatattcccacggcttttccagcacctgatctgcccatttgctttttactacttttgcctttaatatcagccattcaaatgactccggcaaataaagcaccacttgatcttttccaccaatcaactgcatcactctgtcaatttcagaaccaaatgccgcgccgtctgcaattacaagtatgcgttcatttttatgcatatttaaataatggaaaacatttgactttccattcattgtctcacatttcaattgctgttgcctacatacagaattaaaaaactgataaccggaattactgtcttccgttattacaacctctggtttgatatccttctctaaagtctgtgctccatatattctgtaaaactcatgataacacggttttaatgttccgtattttcctgaagtacgaattccatagatttcctccacgctatacggcaaagaaggcaaggattccctggaaataatgacataataattatctgttttctgaatagtatctgcgaattctactgtcttgataaattcgtttccctcatcaataaatacaatactatcctgcattgctgataactgttctttccacagtgagccttcgagcacataacattttttgtcacacgtcagttccacaggggtcccggatggattgtttacgtattcccgaatcatatctaccaatgtggtttttccagttgcgctgtctccccggatgaccgtcagatttcttcgaatttcaaaatcatattttaagcgctttgttgatacaataattctatgttttcccttcat

SEQ ID NO: 32 - DNA, 10532 bp, unidentified
  source 1..10532: mol_type = unassigned DNA
tcagaaaatacttgtatcagtgatctgaccgtttgacaagctgttgacgagaccacgcatttcctctttggagcgaatacagtgtgccgagtcgattatctgctgtctttgaagcggatccagcttagcaaagtaagcatatgccgcaggcacctgagcaagagccatagacagccccagcggcaattcctgcccgtgagcaaaagagttgtttttcatttttatcacctccgcatatattatttcccaggcaataaaaataataaatccttacgatcttatatgtgatactgcacaatttatcacatcgtaatttgtgcaaacaaatgatttattttttaatttggcaacatttctgcaattgttgcatttttcatgcaacaaaagtggtgattttcgggataagtataaggatattatcccaaatcgaatatcctgcaaggtagcagtgtatgaggacacattctgagggcgtgagttaggtgaacacgatgagaggttctgatcgcacagaaaagcacttcctgcaccttgtttgaagcttgaaaatcgaatataaacggctgaaacacgaaccccacggcaacaaatctgtaggggcgaacagcgttcgcccgtcttggtcgcccgtcaaaccctgcgttatccgcacaatttactgcatttcacaaaccatgtaggggacggcgccctcgacgtcccaccaccacaacgttttgcattattgtttattccacaaaccatgacaaccacacaacgcatggtaggggcgaacagcgttcgcccgtttcgttccccccactcaacttcatgaaaaatccaaacctcgcaactcccccgaaacgggctgtcgtatttctgtgagcttgcgaacagaaatttcgccaatcccctacagatattcgtgcaagttctaccaccacaaaatcgctccgctgggtcattccttacttcataggaatattattcttttccaaatcagttgacaatcttttgttaatatgatataattattttgttaattttttgtcgatttatcagttaatctgaggtgtattaataaatggataatctttctaatataagtgtgataaaagatgttctcgcaagacataatttcactttctccaaggctctcggtcagaacttcctggtgaatccctccgtttgccccaagatagccgaaatgggcaatgcaaaaaaaggcttcggcataatcgagataggcacaggcataggcgttctcacaaacgagcttgccaagcgtgccgacaaggtggtggctatcgaaattgacgacaggcttatgccggtccttgcagaaactcttgcagaatatgacaatgtgaagataataaacgccgacgtcatggaaactgacctccataagcttattgccgaggaatttcagggcatggacgttgccgtttgtgcaaatctgccttactatataacctcgcccatattaatgatgctccttgaagaacgtctgcccataaagtctgttactgtcatggtgcagaaagaagcaggcacacgtctttgtgcccctatgggtacaagagatatgggagcagtcacagtggcaataaattatttttctgtaccgaaactgcttttcaacgtatcacgaggaagcttcatgccctcgcctaacgttgacagctgcgtggtgaggtttgatatccgtgataagacccccgagggcgtgacggacgaaaagttcttttttaaagtcgctaggggagcattttcacagcgaagaaagactctctcaaattccgtatcatcatcaatgggtatagataaatctatagtaaatcaggcgatagagcaaagcggcctgcctgcctccgtccgtcctgaagctctttccatggaacaattcataaccttttccgaagcccttagaaagcttatctaattgtaggggagtcgcacagtttctgcaagacgtcccgttcttcggatatctcaaattaaaaattattacgcaaacattgattgtgttttttcaaaagatgtatgggagtggctttgagatctgtccgtaaatttggtcagtatttcaatttcaagcccatattgcgacacctttcgcttgatagtcctgctaaaatgtaattattacattttggaaacataggacgtgataagcaatggaaaaaatacggcatacggcaaaatttcatacctcaggtaaaacgaatgtacttatggctgttttatcggcggcagcagcgtttgcggcaagcttcggaaagatcttaggcttcccatcgtcaatgaacgtggcggtggcagtgctttcgggaactaatgtgatacctgcttttttaggctctgcacttgcatattttgtaagcggaacattctcagagggtatcgttcagctttgtgcgatacttgttataggggcggtaaggcttgtgatgccctctgctgaccataaggacgaccccgtttttgtgtcgctcctcacaacaggagcaatgcttcttttcagctgtgtaatgtcggtggcaatgccgtcggatacatatacggcttcactgcgaatgataagctcgctcatgtgtggctgtgttgtttttattgcactgaccgtaaaacgtcaaagaaaccgaagcggtgtttttgaccttacaggaataaacggagttttcacagctatactttatattatgtttatctcgaccatcactgccgcaccgctccatgtggtgaatctgggcaggatagcaggcactttgtttatgcttatggcagtgcgaaagtatagaaatataggcggtgcagtcgttggtgcattgaccacctgcggtgtactcctttgtgctccgtcacttgcgagaaatacacttttgcttgccacgtcaggacttatctgcggagcttttctgcaattcggctctcttgtgatagtgtttgttttccttgcagtttcacttgtgagccttgtggcaatgggcgtgaacggtgatacattttcaatgtttgctgatttgcttataggctctgtgctttttatcgccctgcctgttcctgtgataaaaagggtggcaaaaaaagtggtgggagtgaaaaattccgttgaccttgtagggcagaccacttcttcaaagctcaacatggcttcgagaactctgggcggtatcagaggtcagcttacaatggtcactgcggcgatagataaacgctcaaaggaagctacactgtcaaagcgtgtacgatctgttgtttgtaccgattgcgatatgtactcagtgtgcagtaagcgttgtgtacagcttgatgacagcttttcaaagcttgaaagcatagtttgtacatataataacctcagccttgacgacgttgaaaagcatttgggtggctgtgtgagaaagtcccttctttgcaaaagcttcaatgaattgtataccgactttgtggcagaacgtgccgacagcatgagagttcgtgaaatgcgtgagtttttaagcgaacagctttcctccatggaggatatcttatccgacctttcttttagggcaggtcaggtgagaagcgttgatcctcagctttcagcaagagtaagggagcatttctcaaaccttggctatccaaatgtgaaagcctgcgtttacatagacgaaaatctttgccagcgtgtggacgttttcataactgcgcagttcaggggtgatcttgtaaggctgacggctacgctttcagaaatgatagattatgaccttgatatgcctgtgatagtcaaggtggataatataaccagaatgtcctttgcggaaataccgaaattcacagttgatataaaaagcttttcggcttcgtcaagcggagaatattcgggggacagctttgaagtcttcgattcaagcgtcaacgaaaagtatatcgtcctttcagacggcatgggaacaggaaaaagagcaagactggattcattgttttccgtaagtcttgttacaaggctcatacgatcgggaatgtctatgcagacagcccataggcttataaattccatgctgagagttaagggctgggaggaatcttttgcgacccttgatataatgcggctggagcttaatggcggaacggtgcagtttctaaaatcgggtgcggcgcaaagctttcttttccgtgacggcggtcttaaagctatcggcggacaggcttttcctgctgggatacttgcggagtgtacacctgatgtgagcgagcttaagctctttgacggggacgttctgcttatgacctcagacggtgtcgaggacgctacagcacgagagatactccgctgtaacggaatgaacgctcaggagatagtcacggcgcttggcgcaaaggcgcttgctcagcgaacaggaggcaggcgtgacgatataactattattgccgcaaaaattttccttcgtgacgagaatgaaaaatgaatgtaaatgactttgccgacttttgcctgcaattttttacttttgtatactttgactttactttttctatgttattatataaaatctattgtgcaaaatatataaaactatctgttgaaatatgtgcgaatacgagaataactactaaaactattgcaaaattgttcaaaaaagattaaaatgtaagtatgaaacaccgaaattattcagcggttttcacaaaaagacaagggaggctgaattgtgatagatattattccaaaggattatgaactgccgctctatcttttccacaatggcacaaactgcgaaacatataagtttcttggctgccataagggagagaaagacggcatagaaggatattattttagagtctgggcagcacacgctgagggcatttctgttgtgggagatttcaatgactgggacgaaaatgccactccaatggagaagatagacgactcagaggtgtgggaggcttttgttacagggcttaagacttatgatacatataaatactgtatccacggctgtgacggcaagacccattataaggctgatccgtacggcacacacatggaggtcgctccgaacaccggctcaaaggttttcgatatagacgattatctttggagcgataaaaagtggatgaccgagaagaagtctaaggatatctacaattgtcctatgaatatctatgaggtacatctcaattcatggaaggcttgtcctgacggaaaatatttctcatatgttagatttgcagatactataatcccttatataaaggaaatgggctatactcatatcgagcttatgccgctggcggaatatccttttgacggctcttggggctatcagggtatcggctattttgcgccgacttcacgtttcggaacgccttatgacttcatgaaaatgatagaccttttccatttggcaggaataggcgttatccttgattgggtgcctgcgcattttccaagagatgaggcaggactgttcgagtttgacggaggtccgtcatatgaatactctgacccgaaaaaggcagatcacctcacttggggaacgagagttttcgattattcaaagggcgaggtaaagtcattccttatctcgaacgctctttactggatagaaaaatatcacgttgacggtctgagagttgacgctgttgcgtctatgctttatcttgactatgacagacgtgacggagagtggacgcctaacaagttcggtggcaaggaaaatcttgaagctgttcagttcttcaaggatctcaataccgctgtgttcggaagaaaccctaatacccttatgatagccgaagagtcaacttcatggcctatggtaacaaagcctgcgagcgacggcggtcttggcttcaatttcaagtggaacatgggctggatgaacgatatgctcaaatatatggctcttgaccctattgacagagcttttcatcatgatatgctcacgttctcattcttctatgctttctctgaaaactttattttgcctatctctcatgacgaggtggtgcatggtaaggcttcattggtaaataaaatgtatggtggagatatcgacaataagttcaagcagtgcaagctgttcatggcttatatgatggctcacccaggtaagaagcttctgttcatgggtgctgattttgctcagttcagagagtgggattacgagaatggtctggaatggttcatggtggacgaatatgagaaccaccgcaattatctgaactactccaagaacctcaatcatttctatcttgaccaccctcagttctgggagagagatttttcttgggagggctttagctggatatcaaatgacgatttcaagcagagcatcatcatcttcagacgtttcgacaaaaacggcggagaggtcatcgttgtgtgcaacttcgttcctgtggaaagaaagtcatactgctttggcgttccttactggggcagctatacagaggtgttcaactcgtcttctgttgacggatccccttgcacgaacggcactgttaaggcggtagatgttaagatgcacggctttgaccagtcagtttgcatcgatattcctgcgttctcttgtatgtatttcacggtgaagaaagaggaaagacctgtgcctgagaaaaaggcagagggaaagaaaaaaacaaagacagcggctaagaaaactgctgtcaagaaagccgctaaggcgaaaacaactaagaagtccacagctaaaaaggctgagtaatatagacttaataaaaattggtgggtgaattaattatgttcaacaaaaaagaatgtgttgcaatgctgctggcaggcggtcagggaagcagattgtatgccctgacacagagcgttgcaaaaccggcagtacctttcggtgctaagtatcgtatcattgattttcctctctcgaactgtatcaattcaggtatcgacacagtgggcgtgctgacacagtatcagccattggtactcaatgagtacattggaaacggtcagccttgggatcttgacagaatacacggaggcgttcatgtgcttcctccttatcagacagcttcaggcgctgattggtattcgggtactgcaaacgctatttatcagaatatcgcttttgtagacagatatgaccctgagtatgttgttgttctttcaggcgaccatatctataaaatggattacaacaagatgcttgaatatcacaaagctaagaacgctgacgctactatcgctgttctggacgttccaaaggaagaggcgtcacgtttcggtatcatgataaccgacgaggacgacaacatcatagacttcgaggagaagccaaagaaccctcgttcaactcttgcttcaatgggtatctacatattcacttggaagaagctgaaagcttatcttatcgctaatgagaacgacaaggaagcttcaaaggacttcggcaagaacattattcctgacatgagagaagcaggcgagaagcttgtggcttatcgttttgacggctactggaaggacgttggaactatcgactctctttgggaagctaatatggaccttatcaatcctaacattcctatcgatctttatgacacaagctggaagatatactcaagaaaccctgttatgccacctcagagcataggcaagaacgctcaggtacagaactctatggtaacagagggctgcgttatcgacggctctgtcgagttctcaatgatctctgacggcgttactgttgaggaaggcgctgagatactggattctatccttatgcctggcgcagttgtcaagaagggtgcaaaggtcgagtatgctatcgttggcgagaacactgttatcggtgagaacgctcagatcggtgcaagacctgaaactatcgaggacaaggactcatggggcgttgctgtagtgggcaataatctgaccgtttctgacggcagtgttgttgcaccaaaggcaataatttacgagaatatctaagaaaggaccgagtaaatatggatgtaaatatgggtaacgtactgggtcttgttttcgctaatatgcacgacacgactcttggcgacatgacaaagaacagaactatgggttctgtaatgttcggcggaagataccgccttatcgacttcccactgtctaacatggtaaacagcggcataagcgaggtcggagttataacaaaatctaactatcagtcacttctggatcacctcggctctgcaagagagtgggatctggcaagaaaaaagggtggactttacattctgcctccattcggcaacgttgaaagcactctttacagaggcaggatcgaggctctttatggtgcgatgagctttatcaagcattcaagagctaaatatgttatcctttcagactgcgacgttgtcacaaacattgactacaagcctatcgttgcggctcacatcgagagcggtgctgatattactgctgttgcacacactggcgtttacagctctgatgatataaagacttcaactgtattcaacgttgacgctgacaagaacgtaacctctgttcttatcaatcctgacatcagcggcacttgcacaacgagccttaatgtgttcgttatgtcaatggatttccttattgaaactgttaatgacgcaatggccagaggaaatgtaagctttgagagaaatattcttcaggagaagtgcagagagcttaagataaagatctacgagtacgataactatttcagcaagctcaacagccctgaaagctactttaagtcaaacatggctctgcttgaacctgagaatgcacgcaagctgttcgttccaaagcgttctatctacacaaaggtaagcgacaatgctcctgttaagtacgatctggacagcaaggtatcaaattctcttattgctgacggctgtatcatagagggcgaggtagagaactctgtactgttcagaggcgttaaggtaggcaagggtgcaaaggtcaagaactgtatccttatgcagggcactgttgttggtgacaatgctgagcttaactatcttatcacagacaagaacgtttctatctgtgaaaaccatatccttacaagctcgccacagtatcctatgtatgtaggaaagggagcttctgtataaaaaggtcgcaatgacttaggaaagagggttcggatatgaacatactttatactgcaagtgaggctttgccttttattgcttcaggtggattggctgatgttgcaggctcactgcctgcggctatcaatgccgagggtcacgattgcagagtcgtgataccttattacagctctatcaggcaggagcttaaggacaagctgacatatgttacgaatttcactgtgccggtggcatggagaaatcaatactgcggcgtttttacaggcgttgtgaacggagtgacttattatcttttggataatgagtattacttccagagaaacggtctgtatggcttttatgatgatgctgagagatttatattcttctcaagggcagttctcgaactgctgagatacatcgactttaagccaaatgttataaacgccaatgactggcagacggcacttgttcctgtttattatgatattttctaccgctatcagcaggggtatgaggatatcaagacggtatttactatacacaatattcagtatcagggacaatatggcttagaacttatcaacgatattatgggcattccgctttatcatacggatctgctttcatatgacggtgatgtgaactttatgaaggctgctattgaaacggctgacaaggtgacgacagtttcgccaagctatgcttgggagatacttgatccatggtattcacatggtcttgacagggagcttgtgaacaagcaatacaagctttgcggaatactcaacggaatagatcagaagatctatgatcctgcaactgatcctgttattgctaagaattatagtttgaatgacaagacgggcaaggctgtttgcaagcacgctttgctcagcgagcttggcatggcacatggaaaagagcctgttatcggtatcgtaacgagatttgtttcacacaagggtcttgaccttatcaagtatgtgtttgaggacatcatcaggcttggctgcaagtttgctatacttggttcgggcgagaagatatacgaggactttttcagcgaaatgcattatcgttatcctgacagagttggtctgaccattggttttgtgcctgagctgtcaaagaagatatacgctggtgcggatatgttccttatgccgtcgcagagcgagccttgcggtttggctcagatgatcgctctgagatatggtactatacctatcgtaagagagacaggcggtttgagagacagtatccatgacgcaggcgacaagggcggcaacggatttacgttcaagtcctacaacgcacatgatatgcttgacgctgttgttagagccagggcgtactatgatgacaagatgaagtggggcaggcttgtgaacactgcgctcaagcagaatttcagttggacaaagtccgccaaggattacattgcactttacaacgacattcactaa

SEQ ID NO: 33 - DNA, 7977 bp, unidentified
  source 1..7977: mol_type = unassigned DNA
  misc_difference 5094: note = a, c, g, or t
  misc_difference 5095: note = a, c, g, or t
  misc_difference 5096: note = a, c, g, or t
  misc_difference 5097: note = a, c, g, or t
  misc_difference 5098: note = a, c, g, or t
  misc_difference 5099: note = a, c, g, or t
  misc_difference 5100: note = a, c, g, or t
  misc_difference 5101: note = a, c, g, or t
  misc_difference 5102: note = a, c, g, or t
  misc_difference 5103: note = a, c, g, or t
  misc_difference 5104: note = a, c, g, or t
  misc_difference 5105: note = a, c, g, or t
  misc_difference 5106: note = a, c, g, or t
  misc_difference 5107: note = a, c, g, or t
  misc_difference 5108: note = a, c, g, or t
  misc_difference 5109: note = a, c, g, or t
  misc_difference 5110: note = a, c, g, or t
  misc_difference 5111: note = a, c, g, or t
  misc_difference 5112: note = a, c, g, or t
  misc_difference 5113: note = a, c, g, or t
  misc_difference 5114: note = a, c, g, or t
  misc_difference 5115: note = a, c, g, or t
  misc_difference 5116: note = a, c, g, or t
  misc_difference 5117: note = a, c, g, or t
  misc_difference 5118: note = a, c, g, or t
  misc_difference 5119: note = a, c, g, or t
  misc_difference 5120: note = a, c, g, or t
  misc_difference 5121: note = a, c, g, or t
  misc_difference 5122: note = a, c, g, or t
  misc_difference 5123: note = a, c, g, or t
  misc_difference 5124: note = a, c, g, or t
  misc_difference 5125: note = a, c, g, or t
  misc_difference 5126: note = a, c, g, or t
  misc_difference 5127: note = a, c, g, or t
  misc_difference 5128: note = a, c, g, or t
  misc_difference 5129: note = a, c, g, or t
  misc_difference 5130: note = a, c, g, or t
  misc_difference 5131: note = a, c, g, or t
  misc_difference 5132: note = a, c, g, or t
  misc_difference 5133: note = a, c, g, or t
  misc_difference 5134: note = a, c, g, or t
  misc_difference 5135: note = a, c, g, or t
  misc_difference 5136: note = a, c, g, or t
  misc_difference 5137: note = a, c, g, or t
  misc_difference 5138: note = a, c, g, or t
  misc_difference 5139: note = a, c, g, or t
  misc_difference 5140: note = a, c, g, or t
  misc_difference 5141: note = a, c, g, or t
  misc_difference 5142: note = a, c, g, or t
  misc_difference 5143: note = a, c, g, or t
  misc_difference 5144: note = a, c, g, or t
  misc_difference 5145: note = a, c, g, or t
  misc_difference 5146: note = a, c, g, or t
  misc_difference 5147: note = a, c, g, or t
  misc_difference 5148: note = a, c, g, or t
  misc_difference 5149: note = a, c, g, or t
  misc_difference 5150: note = a, c, g, or t
  misc_difference 5151: note = a, c, g, or t
  misc_difference 5152: note = a, c, g, or t
  misc_difference 5153: note = a, c, g, or t
  misc_difference 5154: note = a, c, g, or t
  misc_difference 5155: note = a, c, g, or t
  misc_difference 5156: note = a, c, g, or t
  misc_difference 5157: note = a, c, g, or t
  misc_difference 5158: note = a, c, g, or t
  misc_difference 5159: note = a, c, g, or t
  misc_difference 5160: note = a, c, g, or t
  misc_difference 5161: note = a, c, g, or t
  misc_difference 5162: note = a, c, g, or t
  misc_difference 5163: note = a, c, g, or t
  misc_difference 5164: note = a, c, g, or t
  misc_difference 5165: note = a, c, g, or t
  misc_difference 5166: note = a, c, g, or t
  misc_difference 5167: note = a, c, g, or t
  misc_difference 5168: note = a, c, g, or t
  misc_difference 5169: note = a, c, g, or t
  misc_difference 5170: note = a, c, g, or t
  misc_difference 5171: note = a, c, g, or t
  misc_difference 5172: note = a, c, g, or t
  misc_difference 5173: note = a, c, g, or t
  misc_difference 5174: note = a, c, g, or t
  misc_difference 5175: note = a, c, g, or t
  misc_difference 5176: note = a, c, g, or t
  misc_difference 5177: note = a, c, g, or t
  misc_difference 5178: note = a, c, g, or t
  misc_difference 5179: note = a, c, g, or t
  misc_difference 5180: note = a, c, g, or t
  misc_difference 5181: note = a, c, g, or t
  misc_difference 5182: note = a, c, g, or t
  misc_difference 5183: note = a, c, g, or t
  misc_difference 5184: note = a, c, g, or t
  misc_difference 5185: note = a, c, g, or t
  misc_difference 5186: note = a, c, g, or t
  misc_difference 5187: note = a, c, g, or t
  misc_difference 5188: note = a, c, g, or t
  misc_difference 5189: note = a, c, g, or t
  misc_difference 5190: note = a, c, g, or t
  misc_difference 5191: note = a, c, g, or t
  misc_difference 5192: note = a, c, g, or t
  misc_difference 5193: note = a, c, g, or t
ttatttaccctcgtatgctgcctgaatctcttttttgaactcttcctcgcccactctctgaagagtaagtctgaaacgctcaccaccgtttgcatgcttctcgaagaaactaattgctgcatctgtcactctgaaaagagtttccttgtcgcggataatcggaactagctgctctcctttatagatgtggtttccgaaaagtcctccaaacgatactatatatccaggagttcccttccatgcatctgtcggacagctctttacgcagcgcgcacagttgttacatttgtctctgtcgatgacaatcctgccatcctccatgctaagtgcaccctcgcggcatgccttcacacatacaccacactggatacaatcgtcatggctgcactctactgtcatgccgcccttgattccgacatcgttttcctcagcctttaagcagttgttctgacagcctgtgacaccaaacttgaacttgtgaggaagctctcttccgaagtatctttcatcaagttccttagccagagtgtatgtatcgatacatccgctaggacagatttctgagccctgacacgctgtgacagtacgtactctcggtccgcagacacctgttcctacaccgccctttgccagctcctcttttaccacattgatatcctcaaccttgataaaaggaatctcaataccctgacgcgatgtcatatgaacatatccgtgtccgtatttctcagcaacctctgctactgttttgatattttctgctgtaagatttcctcctacaaccgcaattctaagcgagaaacagcccttttgcttctgtctcatgaatccgcccttttttagggccgcgtaatcaactttctccgccattttagtctccttactgtgtaaatatgttaatgttttgttttatatgtaaatgcatatgcacgctctcatttgcatacacattgataccttattatgatggcttaatcagctatatttgcaaaagcctgtgcaaaatcctccttgaggtcatctatatcctcgatacccacgctgactcttataagatcctcaaatactcctgcatcctccttctgcttatctgtgctgtgaagactgattgtggagcccggatgaatgaccagtgtctttgtatctccgatattgctgagtatgtatggaatcgtcaggctgtctataaatttaaatgccttttccttgctgccaaccctgattgtaaggattgctccatagccgtttgtgagctgtttttttgctatttcatgccatttgctgctacaaagccccggataattaacctttatgtcaggataattgttttctatccacgacgcaagatcgagtgcattagagcattctctttccattctaagaccgagtgtctcaagtcctataatatttaagtatgcattcaccggagctaaacaggcacccatatttctgaaaagactgtttctcagctttgcgacaaatgccataggtccatacttcacataatctgcaaaacccggatatctgttcttgtcccatttgaacttacctgagtctgtcagaataccactgattgcattgctgcttccattgatatatttggaagatgaattgaccacgatatcagctccatgctttaaaacctgtatcaggtacgctgtcgatgtggtattgtcaactacaagcggtatatcatgtgcgtgtgctatctctgcaagcttctcaatatctgtgacatccagacaggggttaccgatagtctctgcaaaaatcagtctggtatgctcattgatgctgtcctctatctgctgccagttgttgttctcgacatacctggttgtgatgccgaaggcctcaagatcatggaacaaatctattgtgccaccgtataggctggcgcttgagatgagctcatctccactgcttagtatatttaagaaggtattcatcagcgccgccatgcctgatgcgcatgccaccgatgctattcctccctcgagctttgttattctgttctcaaaagctgtaatcgtaggattggcaactcttgtgtaacagtagcccggagccttgttttcaaatattttttccagatctgccgcgctctcctgctcgaaggcgcttgtctgatataccggtggcagtgtagagccatttgtctcttttgtcacgccggcatgaagtaagcttgtattaaatctcattgttttcttcttctcgttaattcttacatagtctattgtgttactaggaattgatgagattattatacaaacgtgtgtgttgaaagtcaatgctatcagttatacgaattatttgtgcgtggttatatattttgtttatagccattaatgtcccttaaatactctgcggctgtcgttgcggcatttgctccgtcagatactgcggttaccacctgacgcagtgtcttggtacggacatctcccgccacatacagtccaggctggacgcttctatcatggtcaccattttttgttgcagcatatgtgatgccgtcctcacctgccactacatatcctctctcatcaagcttcaccagattctttataagctctgactgcggtactgaaccatatgccacgaataccccgtctacagccagtgtcctgccacttttaagcattatgcctgttggctttttttctccatatatttctgtcactgtttcgtttaggacaagctctacattttctttctgctttaagagctcaactgtgctctgtgcaccgcggaagctgtctcttctgtgaaccagatagaccttctcacatatatcggacagatataatgcatcatccaaagcggtatctccgccgcccagcactgcggctgtctttcctttatagaatgctccgtcacagattgcgcagtaagatactcccttaccggtatactcatcctctcccggcactcctgcctttctcggatatgctcctgcggtatagatgagcgctcttgcctctgctatcgtgtcatcatcgaatttcactctgtatatcactgattcttctttctcactgttttgcactgcttctatctgcactgcttctttttcgataaattctacatcaagagacactgcatgctccctgaatttttctcccaggtcatatccgtttatgtttggaaaccccagatagttgttcacatttccgctctcggctatctggcctgtcccctcgtattctttttctgctactgccacattcagattggctctctttgcatatattgctgcagacatccctgccggaccactgcctattattattatatcaaacatggaattggttcctttcatcgtccattgaattttttcggtaacttattatatacattatccttaaaaaatacaataataccgcctgcttttataaaacacctttataaaaacaagcggtatcaattttatctatcgtatatacatcctggcctcataaggtctgagcactgacatatcagaggtatccttataatttgaaatcaacacctccatgccctcacactcctttgcaagcggcattggtatctccttatcaaagaaattgcacacaacaatcatggttttttcttcattctttctgctgtatgcaaaaatattctcatcatcctcaagtaaaagtgtgaatttaccatcaacaaataccggataatcctttctcagctgaacaagcttcttgtagcagctaaagattgaatcagggtcatccacctgtgatttagcatttattttgtcgtaattgtcatttacctttatccaaggtgttcctgtggtgaagccggcatttgccgagtcatcccactgcataggtgtccttgcattgtcacggccctttgcgtaaatggacttcatgatttcatcctttgaatatcctttttcaaggcgctcatggtacatgtttatgatttcacagtccttataatcctcgatatcatactgtacatttgtcatgcccagctcctcgccctgatagatgtatggtgtaccctgcatgccgtgcagcaatatagcaagcatctttgcagattccactctgtactccctgtcattgccccatcttgacacgatacgcggcagatcatgattgtcccagaacagactgttccagccacagttgtagagctcattctgccagtgagccattatctttttgagctttttaaacggaagcggtgcaaggtcccatttctcgccgccctccttctggtcaagccctatgtgctcaaactggaacaccatagaaaactcgctgccatccggattgctgtaaagctttgcgcgctctgtgtctgcgccccatgcctcacctacggtaatcaggtcgcccttctggaatgtctccctgctcagttccttaaaatattcctgaagccttggtccatttatggtgattctcttgtccggctcttttgctatctggtcgattacatcaagtctgaagccgccgactcccttatccatccaccagagaatcatatcgtagattgctcttctgacctttggattctcccagtttaaatccggctgctccggtaaaaactgatggaaataatactgtccgatttccggcacatattcccatgcgcttccaccgaaacaagccttcatatcacttggcggcacgccttcatctccatctctccaaatatagtagtcatggtatggattgtccttgctctttttagcctccttgaaccacctgtgctcgtttgaagaatgatttaagacaagatccatcataatccttatattgtgcttctttgcctcgtttatgagctcctccatatcatcgagactgccaaacgtcggatcaatatccctgtaatccgaaatgtcataaccgttgtcctcctgcggtgatttgaataccggcgaaagccatattgcattgattccaagcgtctcaagataatcaagtcttttgatgataccctgtaaatcaccaaagccgtctccgttagaatcctgaaagctctttggataaatctggtaaactaccgcctttttccaccatttttcattattgtttttgctcattatgccctccttgtctcttcattatctcttttagnnnnnnnnnnnnnnnnnnnnnnnnnnnnnnnnnnnnnnnnnnnnnnnnnnnnnnnnnnnnnnnnnnnnnnnnnnnnnnnnnnnnnnnnnnnnnnnnnnnngtttctttaatgctgtatcaaattatgctattttacaagcaccaccaaaacctcacagctttcaagcttaagctcggatgctcccactgaaacagtgctcttttcagcatcatttgtgttggacaaaagcacctttttcacactgccatccagcctgatttgtgcctctttactgccaaaatttgccacaaccagcacgcgcttattttcatcctctctgtaataagccatgatgccatctgtatcctcatatgccggaacacatctgccgtaggtgaacagctccttaaattcatctgactttctgagtgccacaagccttctgtaatagttcaaaacagatgaaggatccttttcctgcgccgcaacattgatagccttatagttttcattgaccttaagccatggctttgctgtggtaaaaccggcatttgcctcatcgctccactgcataggtgtccttgcattatccctgctcatccttccacaggctgcaagtgcctgctcctttgataagcctgctgcaagtgctgccttgtactgatcctttgtgctgatatcgtcatactcatctatactgttccattttgcattttgcataccgatttcctgtccctggtatataaacggaatgcctcgaagcagtacgctgacagttcctaacatctttattccggcaggattttgagcatgccttggtaaaaatcttgaggcacctctcggctcatcatgattttctatgatattggccttaaagccgtacttttctgtctcaagctgtgaaccaagaatggtctttctccatgtgtcaaaatctattttcggtgcatcataccaaccatgctctccatcacttaagcactgtgcacaaaaatcaaatatcgttgaaaaatgcccattctcaccgataaactccggcagctcctcaggcttcatattgaatacctcgccaaccgtaaatgcatcatacttcttaaatgtattgttctttaattcctctaagagctctccgacaccttctgcactttcaaccatcttgtagcaggcagccagtccgtcctctgcatccggctcaaaatcagggaaatcgagatttttctttatattgattatcgcatctattctaaatcctgacaagcccttatcaagccaccagttaatcatctcataaagcttttgtcttagcttttcattctcccagtttaaatccggctgctccttcgcaaacatgtgcagataatacttgtccgtgcccggcaccttctcccagcagcttccgccaaaataagagcggtaattgctcggcggattgccgtttttaccttttctgaaataaaagtaatcagcatactctccatccggatccttaagtgccttttgaaaccattcgtgcttatccgagcagtgatttattaccagatccatgatgatgtgcatatcacgcttctttgcctcggcaaggagctcatcaaactcctccatagtaccgaattcttcagctatcgcatagtaatcagatatgtcatagccctgatccacaaatggcgatttatatatcggagacagccatatgatgtcaattccaagcgattttaaataatccagctttgaaatgatacctcttaaatctcctattccgtcaccgtttgtatccagaaagctctttggataaatctgatatgccaccttgtcatgccaccattttctctccataatgtgtacctcttatctaatcataaattttgcacctatttacatcttgagcactttgtcttgatgtattatactgctattatagaaagtgattagtataaattcttgcaatattttttcattttataacacaatactgctcttataatttaaagggtatagttttaaaagctatggagaaacaacaatatgaaaaataataatccgcctgccctcgggcagaaagaaaacgcaaagcacggagaagtatttttccccgttcaaaaatatataacaagacttgcagcagattaccctgtcatcactacacactggcacgatgaggcagagctcacactgattacaaagggctcatgcacctatcagattgatttgctcgaatatgaagcaaaggaaggcgatatcatctttatcccgccactgctgctgcattccatttcaataagggactgcgacgaattttactcggaaacgtatgtattccatatcaattttttaggtggaaacaataccgatatatgctcttcaagatatctgactccgctaatcaaccatgagtttgccatgccttacctgattgcaccgaagcatccggcatattcatccctttgcaaatgcttcatgcgcataacaaatctatactcccgtcaggaattcggctatgagctggctctaaaggcatttctgcttcaggcaatatttctattgctgcaatacagtgaaaaaaatgctgattttggtgtcaacacatcctccgataagctcaaaaatgtgctcgattacatcgaggtacactatgccgaaagcatccaggttgcagagcttgccggactttgctatttcagtgaataccacttcatgcgtttcttcaaaaaacacatgaacatgacctgcgtgcagtatatcaacaatgtgcgtcttgaaaaatccgtggaacagttcgagcgcggcaacacctcaattttagatgtctcactgtctgtcggatttcacaatctgagctattttcacagggcatttaaaaagaggtatcatatgacacctctttcctttatcaaaagccttgaataa

SEQ ID NO: 34 - DNA, 5398 bp, unidentified
  source 1..5398: mol_type = unassigned DNA
atggagatcagagaaattacgactcccgatgaaaagcggcgcattacgcgctttattttagaatcgctgcccgactggtttggcattccagaggcgcgcgaggaatacatcgaaaagagtgttaagcagccgttttttgccgcgttcgacggcgagaacgccgtcggcttcctttaccttgccgaaacggggagggatacagcggaactctatgtcatgggcgtgctgaaagaataccaccgccgcggcgtcggcaagatgctctttgccgcagcgaagcagcgggcgaaggagcttggctactcgtttttgcaggtcaagaccgtgcagatggggaagtaccctgagtacgacgcgacgaaccgcttctatctcgccctcggttttggtgagtttgaggtattcccgacgctctgggacgagtggaacccgtgtcaaatctacgtgatgagcctgaaataagaaaatgttggaactttttcccgccgttttgcgtctataaaagcagaaaaacaggggagggaagcatatgaccgtccgcgaaccgaaaaaacgctctaatttgcggctgaagctcggcggcgcgtattttagcgcgcagcgaaaactcagatggctttcgatgcggaagcattttgcgcgcgagtgcagcggggaagacttagcatatcaggcgttttcccaccatacgccgctcatgcgaaagctcaaggacgtcgacatgcagctccagcgcaacaaggtgacgaatctccgcctcgcctgtgcgcggctcgacgggcttttgctgcgccccggtgaaacgatgagctactggtatctcatcggaaagccgacggcggggaaggggtatctgcccggcatgatcctgcgcaacggcgggtatctggccgcgacgggcggcgggctctgccagctctcaaacctcatctactggatgacgctgcacacgccgctcacggtcgtcgagcgccaccgccacggctacgacgtctttcccgacgcgaaccgcacgcagcccttcggcagcggtgcgacctgcttttacccctatcttgacctgatgatccgcaacgacacacaggacacctatcagatgcgcgtacgcgtcggcaagacagaccttgagggcgagtggcgcgtgagcgccgagccgaccgagcgctatgcggtcgtcgagcgcaaccacgagatgcgcgcgcagtactggggcggctacatccgccacaacgagctctaccggcagacgtttgatttgcagggcaacctgctcgcggaaacgctcgtcgccgtgaacgacgcggtgatgatgtactcgccgtatctcgaagaaagcaaaaaggaaggctgacaaagtcaaccttccttttatcttattcagccgtttcgtccgcatcttcgggcttatcctcttcctcaggctcctcccacggctgcatcgtggcgacacagcggttgatgttcttgccctcggcatagaatttggcctcatagtcagtcatcacgccgcgctgtccgcttccgtgcaggtcgcgcgtgacctcggaaagggtgaagccaaactgcggaatttcctcgatcgaccactcaaacagcgggtcgttgtcggtcttgaaatgaatttggccgttgtccttgagcaccttgcggtagagcttcaagaaattgccgtgcgtcagccgacgcttggcctgccgcttgggcggccacgggtcgcagaagttgacatagatgcggtcgacctcgccctgatcaaaaatctcagggagttggttggcgtcgatgtcgatgaaaaagacgttgtgcagctctgccttcgccgcacgctccatcgcgacgaccatcgcgtcgggcaccttttcgaccgcgatgagcagcacgtcgggctccgccgcggccgtctcgacggtgaagcggcccttgccgcagccgagctccacgcggatctccttcgcctcgggcatcaagtcgtgccagcggcccttgcgctcgtagggatccttgatctgatacgccccgcaccgctccatgcggggaagcaggtttttctttttgcgcattcgcatagaatgaacctcgttttcctataattcaatcctatcatatcgaaaattggtgcaagagacaagtcattttaaaaattttatacaagagttgctgcattgggagaaaagatcattaaaaatgcagcgtttcttgcaatgacaccggaaaagtgtgaaacttttttgaaaaaagtgatttttctcttgcaaatatgccttgccgcccatataatagggggcagttgaagaagacaggaggagacacatgatgtcttttgtcaaatatgaacccaagggcaacattgcctatctcatcattgaccgcgaaaaggcgctcaacgcgctcaattctcaggtgctcgccgatctcgatgccgcgctcgacgcggtggacttaagcgagatccgctgcctgatcgtccgcggcgcgggcgagaagtcctttgtcgccggcgcggacatcgcgcagatgaaggagctcagcaaggaggaggccgaggccttcggcaagcagggcaacgacgtcatgcgcaagctcgaagcgttccccatcccgacgatcgcggcggtgggcggctatgccctcggcggcggctgcgagctcgcgatgagctgcgacttccgcatctgctccgataccgccgttttcggccagcccgaaacgggtctcggcatcacgccgggctttggcggcacgcagcgccttgcgcgcctcgtcggccccggcatggccaagcagatgatctacaccgcccgcaacatcaaggcggacgaggcctaccgcatcggccttgtcaacgcggtctatccgctttctgacctctacgccgcggcggaaaagctcgccggccagatcgccggcaacgcgcccatcgcggtgcgcgcgtccaagcaggccatcaacgacggtcttcaggtcgacattgaccgcgccgtcgtgatcgaggagaaggccttcggctcctgcttccagagcgccgaccagcaggagggcatgggcgctttcctcgaaaagcgcaagcacgagccctttatcaacaagtgattccatagaattatctatttatattgtaggaggatacacacaatgaaagttgcagttttcggcgccggcaccatgggcagcggcatcgctcaggtcttcgcggccaagggccacaccgctctgatgtacgcttccagcgtcgcttccgctcagcgccacaaggataagctcgccgcttccctgcagaagcgtgtcgagaagggcaagatgaccgaagaggctaaggacgccatcctgaacaacatcctcgtcgaggagaagtctgccgcggcggacgccgacctcgttatcgagtgcgtcaaggaagagatgggcaccaagcgcgagctgctcggcgagctcgacgagatgtgcaaggagagcaccgttttcgcgaccaacacctcttctttgtccgtcaccgagatgggtctcggcctcaagcacgccgtcatcggcatgcacttcttcaaccccgtgcccagcatgaagctcgttgaggtcatccgcggcgccaacaccacgcaggagaccttcgacttcatctacaacctctccaaggagatcggcaaggagcctgtcgaggtcgctgaggctccgggcttcgtcgtcaacaagatcctgatcccgatgatcaacgaggccatcggcctggtcgagaccggcgttgcctctgtcgaggatatcgacaaggccatgatgctcggcgcgaaccaccccatgggccccctcgccctgggcgacttcatcggcctggacgtctgcctcgccatcatgaacgtcctctacagcgagaccggcgatccgaagtatcgtcccgctctgctgctcaagaagatggtccgcggcggccagctcggcaagaagtccggcaagggcttctacgattacagcaagaagtaatccgttcctaaaaggataaaaaggggaggaagtttacaaaaactgcctccccttttctcttttggaatggaaaggattcctgaaaatgacagaaaactgtcataaaaggaacggaaatgtcaaaaagactttaatgaattcggcgaaaagcacgaattccaaaaaggaatgatagttcctcttgcgaaaatgaaacgcacaggatataatgaaagtcacggaactgatttgtgaaaaattagacaatccaattatttttatagtgaaggagcaaaagactatggatttccatctgtccaaagaacatctgctggtccgcaaaatgtatcgcgaatttgcagaaaatgaagtcaagcctttagctgaggaactcgatgaggaagagcgcttccccatggagaccgtcgaaaagatggccaagctcggcatgatgggtatttacttcccgaagcagtacggcggcgccggcggcgatgttctcagttatgccatgtgcgtggaggagctcgctaaggtttgcggcaccaccgctgttatcgtttccgcccatacctccctctgctgcgctcccattttcgagaacggcaccgaggagcagaagatgaagtatctgcctgaccttctgtccggccgcaagatcggcgcgttcggtctgaccgagcccggcgccggtaccgacgcctccggccagcagaccaccgctgtcaagaacgagaacggcgactacgtcctcaacggcagcaagtgcttcatcaccaacggtaacgttgcctccactttcgtcgtgttcgccatgaccgacaagagcaagggcaaccacggcatcaccgccttcatcgttgagaaggacttccccggcttctccaccggtaagcacgagaagaagatgggtatccgaggcagctctacctgcgacctcgtcttcgaagactgcgtcgttcccaaggagaacctgctcggcaaggaaggcgaaggcttcaagatcgctatgaagaccctcgacggcggccgtatcggtatcgcctcccaggctctcggccttgccgagggcgccatcaacgaggctgtcaagtacaccaaggagcgcgtccagtttggccgccgcctgagccagttccagaacacccagttccagctggccgacatgcacacccgcacccaggctgcccagtacctcgtgtacgcggctgccatgaagaagcagaatcacgaggattactccatggacgctgccatggccaagctcttcgcggccgagaccgcttccgacgtcacccgccgcgctgttcagctcttcggcggctatggctacacccgtgagtatcccgttgagcgcatgatgcgcgatgccaagatcaccgagatctacgagggcacttccgaagtccagcgtatggtcgttgccaagtatcttggtgtgaactaa

SEQ ID NO: 35 - DNA, 25835 bp, unidentified
  source 1..25835: mol_type = unassigned DNA
  misc_difference 8364: note = a, c, g, or t
  misc_difference 8365: note = a, c, g, or t
  misc_difference 8366: note = a, c, g, or t
  misc_difference 8367: note = a, c, g, or t
  misc_difference 8368: note = a, c, g, or t
  misc_difference 8369: note = a, c, g, or t
  misc_difference 8370: note = a, c, g, or t
  misc_difference 8371: note = a, c, g, or t
  misc_difference 8372: note = a, c, g, or t
  misc_difference 8373: note = a, c, g, or t
ttacagatgacggatctccgtcttttcaaggcaatttttcaaaagctgttccacatcaagcttctgttccgcagcctccaccacgttcaaagtggggcgggtgcgcgggtgcttcggcgtaaacaccgtgcagcagtcctcatacggctcaatggaaatatcatacgtgtcaatgcggtgcgcaagcgtcacgatttccgacttgtcgctgccgataagcggacggaaaaccggcatattcgccgcggcgtccgtgcaggcgatggcctgaatggtctggcttgccacctgcccaaggctctcacccgtgatgagtgcactgcattcgcgctcgcgtgcaatgcactcggcggcacgcatcataaagcggcgcataatcacggtcgcaagctcctccgggcagttgtctcgaatttgctcctgaatttcggtgaacggcacggtaatcatatccattctgcccgcgtattcgccgaccttcttcagcagcgccaccaccttttcatgtgcgcgctcgctcgtgtacggcgggctcgcaaagtgaatggccgtcagctccacgccgcgctttgccatcatccacgccgccaccgggctgtcgaggccgccgctgatgagaatggccgccttgccgcccgtacccaccggaatgccgcccgcgccgggcttcgtctcgccgtggatatacgccgctttctcgcggatttccacgcgcaccgtgatctccgggttatgcacgtctacggaaatttgcgggttcgcgcgcagcagcgccgcgcccacctcgcgggagatttccatggagccgagcgggaacttcttgtccgcacgcttcgattccaccttgaacgtcttaaagcccgcgagtgtgtcattgaggtattccggcgccatttttgtaatggcgtccatgtccttttcacacacgcaagcgcgcgcatagccaatgacgccgaaaatcttcgagatgcgctcctcggcctcgtcaatgtccgcgtcctcgtccttcggttcaatgtaaatggtggactgcatagagtacacctcaaagttgcccgcgcgcgcaatgcggcggcgaatgttctttaacagccggtcttcaaacgtgcggcgattcaatccctttaagacgatctcgccgagcttgaccagaatcacttcctgcatgacaaaattcctttccatctataaactcacgcttacgcgtgcgaaagcgtttggaggccctctttcaaggcgtccgcaaacgcgtccatttcttctgctgtgttttccgccgaaaggcttacgcgcagcgatgtttcaacgcgctccttcggcagctgcatcgcactcagaacgtggctcggttttgccttgccgcacgcagaaccgcttgaaacaaaaatgtttcgctccgccaaaaagtgcagcatcgtctccgcacgcacgcgccccgccgaaagattcacaatatacggcaacgcgttttcgggcgagttcaaaacaacctccggcatcgctttcagccgttcaatcaaatgcgcctgcaccgcttttacgtgtgtgagcgcctctttttccgtcatcatgtgcttcaccgcttcgccgaacgcacaaatttgcggtacgccctcggtgccggggcgcagatttttctcttgcccgccgccgaagctgtgcggcaaaatgcgtatgccgcttttcacgtacagcgcacccacgcccttcggcgcatgcaccttgtggcccgaaacactgatgaggtcaacaccgagctttttcggctggagcggaattttgcagaagccctgcaccgcatccgtatgaaacagcgccggggcctttttcctcttgatcatgcctgcaatgtctttcagtggcagcaaaacacctgtttcgttattcaccgccatcacgctgaccaaaatcgtcttcgcatcaatggccgcatcaaatttctctttcggaatatttccgtccgcctccggctgcacatacacgacctcaaagccctctttttcaagctgtgccatcgtattgagcaccgccggatgctcgatcgccgtcgtcacaatcttgttgcccgcgcgctttttcgcgtgcgccgcacccaaaatcgcaatgttgtcgctctctgtgccgccggacgtgaagtaaatctcccccggctgcgccgaaagtctctcggcgatgatctcccgcgccgcagccatctccttttccgccgcaaagcccttgctgtgcagcgaagaggggttgccgtagcattccgtcatcatgtaaagcgccttttccgccgcctcttttgaaacgcgcgtcgtcgcgctgttgtccaaataaatttcctgtgtcgtatccatcattatcccttacagttttcggtagccggtcgaaaaatcgaccacatttctaagcggctcacccgccagaaaacgctttaaattctccgccataatacgcacaatgcggtcgtgcgtctcctgcaaatggtatccgccggagatatgcggtgtgatgaccgcgttttccgtcttccacagcggatgatctgcgggcagcggctccgggtcggtcacatccacgcccgcgcccgcaagctttccgttttccagcgccgcgcacagcgcatctgtgtcgacgatcatcccgcggccgacgtttaataaaatcgcgccgtccttcatcttcgccatgcgctctgcgtcaaacatacccttcgttgccgtcgtgcccggcagcgtaatggccacgcagtccgcctgtggcaaatattcgtcaagcttatccgtatggatgagttcgtccacaaaatcgggcttatccgtacccgtgcggcgcacgccgatcacccttgcgcccagcgctttcgcacgcttcgcaaattccccaccgatgtcgccgaggccgagcaccagcaccgtcgagttccacgccgagcgcacctgcccgaggtcgcaccacttgcccgtgcgctgcacatcgcggtacaaatgcagtttttttaaaagttcaagccacaccgcgaccatgtattccgaaatcgcaaggccatacgcgcccgttgcatttgtcaaaacggtttccttcggcagacagccgtggatatacccgtccacgcccgcactgttcgtctgcaaccatttaagcttatcgccggtcgagatgagcttcgggctcacgttgccgaggattatatccgcgttctgcacgtcctcgcgctctgccttgccctctttataaataaacgtctcccccggcgcgacttcttcgagccacacgcgctgatagggcttcgcctccatcgcaactaaaatgttcacagtgtttcgatctcctctctccacaccgtattgcacgcatcgctcggcatgcggaaatcgccgcgcggcgaaagcgtcacagagcccaccttcgggccgtccggcaggcaggagcgcttaaactgctgttggaagaagcggcggtagaacgttttcagccactttttaatggtctcggcgtcatactgccccgcaaatgagcgcagcgccatcgcataaattttacgtggcgtaaacccaaagcgcaacatataatacaaatagtaatcatgcagttcatacggccccacaaggtcttccgtcttctgcgagatttcgccgtccttcggcggcaataattccgggctgaccggcgtgtccaaaatatcaagtaaaacgcggcgcagctcgtcgttgccgtgcatcgcctcataacgcacgaggtggcgcaccagtgtcttcgggatagacgcattcaccgcatacatcgacatgtggtcgccgttgtacgtcgcccagccgagcgcaagctcggaaaggtcgcccgtgccgatgacaatgccgccgtgctgattcgcaatgtccatcaaaagctgtgtgcgctcgcgcgcctgcgaattttcatacgtcacgtccagcacctcgggatcgtgctgaatgtccttaaagtgctgctccaccgccttcgcaatcggaatttcatcaaaatgcaccttgagctcttccgcaaggcactgcgcgttgctcttcgtgcgcgccgtcgtgccgaagcatggcatcgataccgtgcggatgcccgtgcgcggcaggccgagcatatcaaacgcgttcgccgtcacaagcaatgccaacgtggaatcgagaccgcccgaaagcccaatgaccgccgttttgcagccgatgtgcttcagtctcgtcgcgagacccgtcgcctgcattttgaggatcgtctcgcagcgtgcggaaaggtcggcgtcgtccttcggcacaaacgggtacgggtacgccgtgcgcgtcgtctcaaactcgggcaggtccatcgaagcgtcgatgatgtcgcacacaggctcgtcctgccacgtattcatgcggcggcgctcctgcacaaggcgctccacgtcgatgtcgccgtaggtgataccgttcgtaaacaaatcgctctcgttcagtaacgagccgttttcgcaaatcaaattgtgtcccgcaaagatcatgtccgtcgtgctttcgccaaagccgctgtccgcgtacacatacgctgcaagcagacgaccggagtgcatgcgcagcatgtcgcggcggtactgcgccttaccgataatttcatcgctgcacgaaagatttaataaaacggtcgcgccgccctttgcaagcgtcacgctcggcgggtctgccacccaaacatcctcgcagatctccacgcccacggtcacgtccggcgcaagctcaaacaccacgtcacggcagccgtaccagtcgcccgcatagcgcagcatgccgctttccggcgcgggggaaaaatggcgcagctcgtaaaattcggagtaattcggaatatgctgctttgccggcaggcccagcaaaacgccgcgactgaacaccgccgcgcagttatacagcgccccgccggacgggatcggcatacccaccgcgcacagaatatcgaggtcttccgtctcttcgatgaggtcaaacaggcacgccttcgcgctttccatcagctttctgtccttaaacaggtcgccgcaggtgtagcccgtcatcgcaagctccgggaacgcgatgaccgaagcgccgtttgcggccgcctcgcggatcattttcgccatctcgtttttgttgtacaggcagtccgccaccttcacgtgcggtgtagccgccgccacgcgcaccattccgtctatttttatgctcacaaataagctcctctcaagtgtcaccggaggtgacacaattatattcacttgcacaaattccccctgccgaaaaaagagcagggggaaactgtttttattctcattcgccggtttcggccgccgtcacaggctccggtgtgggctcctctgtgggggccgccgtcggttctgcgggcggcgcaggggtcggctccggcgtaggcgccgcagtcggcgcaggggtcgcagtgggcgcaggggtcgcggtgggcgctgccgttggggttgccgtaggtgtcgggctcggggaagacgtctccgtgcccgggccgatgcggtaaatggtgccgcttgggccgtagtaggaggaaggcagcgtctcggtgcggatgacctctccgtccttcacaaaatcgcgccaagcgctcgcctcatagccccagttgccgcttgtggaaagcaccttttcgccctttttaaggttctggtccaccacgtatttcacagtgctcagcggcgggatctcgctcgtcgtctgggaatacacattgatcgtatcccactctttcggatgcttgccgtagaactgcacatgcagcgtcacaccgtccatccaactcataatgtacaccggggtgtcaagatcattgcggaactggaagtcgatctcgccgtaactcaccgtcgcgtccagaccaatcggcacgtacgtagacggtgaagaatggcagtcgcgcagcgtgattgtcatacccgcacgcagcgcagcgccgtagatcgttgaagaagcctgacaaatgccgccgccgtacatctgcaccagcgcgccgccggaaaggccgcccgccggcaaaaagcccgtggaagcgtttgtggaatcgcccacaatgttttcataagagaatgtgtcgcccgggttcaaaaccgtgccgttcacgcgggaaagcgccagacccatgttgtggttgccgttttccgtattcgtcgagaccgtctcaaacgaggagatcatgccgaaatcttttctcaggtcgtccacggtcactttcgccgcggtctcctgcaaagcagcttccacttcgccgctcgtcttcttaaggaactgcgccttcacggcggcaagcgttccgtaaacgtccagctttttgccgttcacagcgtcctcaaacgcaaagtcgcccgcgtcaaagtcataagagcccacggtcgcgtccttagcctgcacgacgaaatcgccgagtctttgctttaattcattttcaaaattcttgagcgtcaggcaatacgtcatttcgtagtcgcccgcttttctcgatttcaaaagccgcgtcagcgtaatatccagcgtatccacaacggtcagctcgctgcccttggcggtcatttcggtgtcgccgcttttcaccgtgacgttgatattcgcatacggctttaacgccgctgctctgcacaccttttcggcttccgcgagcttcatgccggaaatgtcgatgccgtccatcgtggtaccttccgcaaacacggtcaggtcttccggctccggggtaggcgtcggcgccgccgtcgccgcagagtcggaagacgtcggcagcttatcgcagcccgcaaagcccagcatcaagacagccgccaaaactgcgccgaccgccgccgcgcgatattttttcgttttatgtctatacatgagatcgcctttctgaaaatcccggcagcttctcacagccgcttttctgtatcgtaccgacttacgttttgcagatattctctccttttcgccggcaaaataccggctgagaatattatacctgccgcatcttttcttgtaaagacatacgtttaaatatgtcttaaaagtttttgaacgcatgtaggttctccgcttactttaagtataccgcaaagccgcaaaaaagtctccagaaaaatgcaaattttccgcaaatttcactcttttttcggatttgatttcttaatttccgcacaatatatggaaattcacaaaaaaatgtgataaactggagcaaaggacagggggatctgaaaataagttttgatttttcagacacacccgatgaaaaggctattgaaaaggagcggtatcatgcgcattttgattctcacctgtgctaccggcggcggccacctgcgcgcggctgcggcacttgaaaaatacatacgcgaaaccaccacccacgaagtcattcaaatggacttcttaaaaagcatcggcaagctgctcgacaaaaccatttgcgacagctacctctttatggcaaagaagaccccgtctctcttcggccgcctctacaaaacgacaaataaagataatccccttgcggatttcgttccccgcacaacggagcttctggcgctccagctctatccgcgtttagcggaggtcgcgccggacgtcatcatcagcgtgcacccgttcgcaacagagatgatctccggtttaaaggagcgccgccgcatcacctgcccgcttatctgcctcatgacagactacggcgtgcacaaggcgtggattgccccgaatgtcgatgcctacgtcgtcgcctgcgacgacatggtgaacgacctgcgccgtctcggcattccgaaagagcatatctacccctacggcatcccggtgcacgacgtcttcttcgacaaggaagaccaggcgaagctcctcaccgaaatggacctcgagccggaagtgcccaccgtgctcttcatggccggcagcatgggcgtctccaacattgtagacctctaccgcggcctgtgctcctccccgctcgatttacagatcatcatcatcacgggcaataacaaaaagctctataagctctttgaaagcgaaattccgaactcgtcgaaaaagacaaagcttgtccagttcacaacggaagtagagcgctttatgcacgcgtccgacctcatcatcacaaagccgggcggcctcaccgtctcggaagcgctcgcatgcaacctgccgctcgccgtgttcgacgccattcccggtcaggaggaagataacgccaacttcctgcaaacgcacgatatgggcgtgcgcgtcacaaaggagaatttctccgctgtcgtgtcctcactcatcgagcataaagagcgtctgcgccgcatgcgcgaaagctgccgcacattcgataaatcccgcgcgaacgagaacatcgtcgcgctcnnnnnnnnnnacgacgctcttccgatctcgctcgccgtaaggcccgcaaaggaatttgcctcgtataacccgaacatctcattctccacggataaaggcgtgttcaacttccgcaccgccgccatcatcgtgcagaacggcaagctgctcgtcacaaaagacgacagcacagagcactactacctccccggcggccgcgtcaccatgcgtgaaaaggccgaggacgccctcacgcgcgagttaaaagaagagctgggtgtcaccgtcgcgccggagcgcgccgtgtggattgcccaaagcttcttcaccccgacaggcaaaaagcagcgttaccacgagctttgcacctacttcaccgtagacgcttccggcaccgatctcatcacccgcggctaccgtttcgacagcccgaatgaaccgagcgtccacttcgcgtggttcccgtttgaagagctgccgtatatcgatttaagaccggcgtttttgaaaaccgaagttcaaaacctgccggagcatacgcagtttattacgattggggattgacgcacgttcaccgcagcccgtcctttcacccaacaaacgcccctcgtttttatcttctttgacgattgattctttgacgattgattttttctccgcacttttcctataatcaagataaaaaacatcgtcctgaacaggaggtctaccatgaaaaaacgctcgctttctccttttgcgtactatgccgcaaaccgcgcattccccgtttttctgttgctcctgcttctgttcggattcaccgcctgctcggcggaaaaaggcgccaaagcgctcgattaccccgccatgttcggcgaaacgaagaacgaagtacttgcggcgctcgatgcggaaaacctcacctacaaggaagacgacctttatgccaacgcctacgttttagaccggaccgaaacgctcgaaaaccgtgatttttcggtctacctgcttttcgatctcaacaccgatacgctttacggctaccgcagggttctggtcgtcgaaaacccgaccgatgcggactgcaagctgcccgaaaagcttctcaacaccctcaccgcgcagtacggcgagccgaccacctaccccggccttgaaaaccgcatctccacgcacctcgaccgcctgagcaccgacgccgtcggttccggcgaggtctacaacgaatactggtcggtgtccgaaaattgcgacgtgtcactcggcgtcagcttcctccccgacggccgcctttttgtggacatcgtctgccaaaccccgcgaacgtaattttagtaaaacttcaaaaggacagcttccccggaagccgtccttttttcattctcattttatctcaaaccttatcccgcatctccgtcatacggttccagtagcgctttggcatgtgggtgcggcggcacaggtcgttccgtctgccctcaatgcccacggtgtcgtagaacgtgcgccacatggcgcggaatttctcctcctccggcgattccggcggcagctcgatgtgctccgcctgcaaaaattccggcgcgccgtctttatataataaagcaagcttatgcgtgcggtcgaagatcatgaaatcttcaccggaaaaacggttgataaaatgcggcgcgataacgggtaaaacgctgtttttcggctcaatctgcgcgataagaacgtcgccgtactccgcaaagcgcagaaaaccaaggtacaagtgcgcttcccgctcaaggaactgcaccgctttcgtgatcttatcgacggcaggctcggtcagtcgcccgcacacgccgcgcccgaccttgtaccctaaccgcatgaattccagcatacgcagttccttttcgggcatacaggtaaaaaacgcgcgctccaaaagatcctgcgcctccatgcccatttttttcggaatcgacacgcgcacacgctcggcacggcgcaggtcggtctcgatatacttcgcgccgaataaacacgtctggtcggcttcatcaacgggcaaaatcgcggcaggcgtttctttttccgcaaagctctcgaacacacaggaaagaaagccgttatatgtgccgtcgtagtaatacattacagttgtccggtcagacattttaccgcgtcctcctttgtggggttgaataataaaagctgctcgggaatttcgggctgtatgccgccttgcggcagcccgcggtcgcgcagaatgcccgccaaaaccgccggttcgtctgtgcgcaaacggcactgcattttgccgttgcaggtgataaaatacgaagcacgctttaagacgacaccgagctttttcagcccctcgtggtcgagcttcgcttgccgtctggcgcggatgatgcgctttgcactcaccacgccgatgcccggcacgcgcaataatttctcatacggcgcgcggttcacctccacggggaattcctccgggtggcgcaccgcccaactgcacttcgggtctaacatagggtcgaggtcgggcgttttttcgctcaataattcgtccgccgtgaagccgtaaaaccgcaaaagccaatcggcctgataaagcctgtgctcgcgcagaagcggcggcgcggtgtcgagcgcgggaagatttctgtcctgcacgaccggtatatacgcagagtaaaacacgcgttttaaagaatacttatggtaaagtccttcgctcagctgcaaaatacgtcggtcgttttccggcgttgcgccgatgatcatttgcgttgactgcccacccggtacgaagcgcggcgcatttttataccgtatgagatcgtgcgcgttttccttgatgccgtcgcgaatgcgcgacataggcagcaggatgttttccttcgatttctgcggcgcaaggcgctttagactgtcgtttgacggcagctcgatattgacgctcatacggtcggcaagcaggccgagctgctgcaaaagtgtctcgtccgcgccgggaatggctttgacgtgaatgtaaccgttgaagtgatactcgttacgcagaatatgcaatgtttcgagcattctttcgcaggtgatgtccggcgagccgaacacggcggagcttaaaaacagcccttcaatataattgcgacggtaaaagctgatggtcagatccgccagctcctgcgggcgaaacgtcgcgcggggcgtgtcgtttgagcggcggttgaggcaatacgtgcagtcataagcacatatgttcgtcattagcacctttaaaagggagatgcaccggccgtcacttgcaaagctgtggcagatgccgcacgcggcggcagagccgagctgcccctttacgcctgcgcggtttacgccgcttgaggtgcacgccgcgtcatattttgcggcatccgttaaaatgcgcagcttttccatggtgtccatttgtgtgttcatgctgttctccctatcttaaagcgcgacgcccttgaacgggttttcgacgtgtgtgcggcggttttccgcagcggactgaaagaggtctttgtgcattaccttgatgccgcgatcaatgatgtcgccaccgtatttgcagcgcagaaaatcgaccgtcgtttcgagcttttgggccttttgtccgcgcgcggcatcttcaaacagcgagcactgcgacataccgagcggcacgagcgacgacacacgcacgccgatgctgcggatggattcgcccgtgtggtgagcgcggaaaagaccgtaagcggcgtcgaaaatgcttttggaatccgccacggcggtgtccagcatcttctggcgctggtaggtctcgaggttatatttgcgcacggaaagctgcacgttgtagccgcaaaggcccttttcgcgcaatctttgtgcgacgctttcggagagcatgtagagctctgcgcgaatttcgccgtcgtcttttaggtcgtgcacggcggtggtgctgttgccgatgcttttgacctcctcgtgctcgttcacacggcgcacgggcgacctgtcttcgccgtttgcgtacatacttaattgctcgcccgccttgccgaatagcctttttaacagctttcggtcggcctttgcagcgtcgccgatggtgtagatgccgtattttctgagcgcttcctgcgtcgatttgccgacgaacaacaggtctgccgccggaagcggccacacgagctctttaaaattctcgcgcgtgaactccgttacggcatccggctttttatagtcgctgccgagctttgcgaaaattttgttgaacgacacgccgattgacaccgtgagcccgagctcatctttgacgcgcgcgcgaatttcctccgcaatctcgcggccgctgccgaacaagcggcggctgccggtcacgtcgagccagcactcgtctaagccgaagctttccaccatgtcggtgtactgcatgtagatctcctttgcaaggcgcgaatactttgcgtagcgctcaaaatgcggcgggacgaacttgatgccggggcatttgcgttccgcttcccacagggcttccgccgttttgacgcctttggccttcgcgagcatatttttcgcgaggacgatgccgtggcgacgctctttatcgccgccgaccgccatgggaatatctttcagcgacgggtcataaagcgtctccacagaggcataaaagttattcatatcgatgtgcagaatgacccgatccacggcttttgcctcctttcgacgcgttgcgaacatgcgttctctatacccttattatagaacatgcgttctgatttgtcaagcggtaaataccggaaaaagcgcgttttgaaaaagatgtccgcttgtgtcctgtgatgttctgcttctgaaaccgcagagatttatgcacaatttgttaccttagtgttaccctaagaacaaagtgtaaacttagtgtgaaagaagtctcggttttcttgaaaaaaagtttttcgcgcattatacttttaactgtgaaattttatttctaaccttatctctataccctcatttctaaggaagtgtttttatttgtttcttgaaaaattgagaagatttatgtacggccggtacggcacggacgaactgaaccttgttttgatgatcctcggtatcatcgtgatgttcctttcgcgcattttctggttctggccgctcgcaatgatttcttacgcgctttacatctatgcgctgttccgtatgttctcgcgcaacatccccgcgcggcaaaaagaatattattctttcttaaaggtatggacaccggcgcaaaaatggtttagaattaagaaaacggcttttcgcgagcgcaagcagtacaaatacttccgctgtccgggctgtcgccagcagctgcgcgcaccgcgcggacgcggtaaaattcttgtcacctgccagcgctgccacaagcagtttaaacaaaagacctgattagggcaaggagtttgaaaaccatgaaagttgcaattttaggcacctggcacgtccacaccaaagagtacaccacgggtgtactgaataacccgaatgcggaagtcgccgtcgtttgggacaacgacgcagagcgcggcaagaagttcgccgatgaaatgaacctgccgttcaacgcagacctcgacgctgtacttggcgacgagagcattgacagcgtggtcatctgcactgcgacctgcgaccacccggagatcatgatgaaggtgacggcggcgaagaagaacatcttcaccgagaaggtgctcaccatcgaccccaaggacgcagagaaggtcgccgaggctgtgaaggcttccggcaaggtatttacgatctcttatccgcaccgcacgttcccgacgctgcgcgcggtaaaagctttgatggacagcggcaagctgggccgtgtgacctacgcacgcgtgcgcaacgtacacaacggcagctccgcaaactggcttcccccgcatttctacgataaagcacagtgcggcggcggcgcaatgatagaccttggctcacacccgatgtacacgctttactggctgctgggagagccgaaatccattacctccacgttcacgcaggtgacgaaccgcggcgttgaggacaatgcggtctccgtcatcgagtttgcagacggcaagatcggcgtttccgagaccggctttgtctccgagtgcaacccgtacacgctggaagtgagcggcacggacggcgctgtgatggtacacggcgacagcgtacagtggggcggcaaggcgaccgaaggcaagtgggtagaccttgagctgccggaaaaggagccgctgccgatcgatcagtggatcgatgctgttgtaaacggcaagccgtctccgttcacgattgacgaggctgtgatgctgacccgtttgatggacggtgcttacaaggcatttgagaccggcgcaaaggcgacgttctgattttaattcttaaataaaaaactctgagcacccgccgcgcgcatttccgtgtgcggcgggtcatttttagggcgaagcctgcggtatcgccttaacgcgtattggaaaccggagggtcattgtggaaaaagaaaaccattctgcagaaaagaaaccgatgcgggaatacaccccgtgggactatgtaaagcccggcattgccattgccgcctttgcggtggggctgattttcgtgctgtttaagttcgatgcggtctcgaaggtgggcagcgtgctctttaacgcggtgagctcgtttattctgggcctttttatcgcgtacattttaaacgtgtttttgaatctgtttgagaacacggtgttcggaagactcacacgcagtgacaacaaggtgtggaaaaagctgaagcgcccggtatgcgtggcgctttcctatgcggtgatcgtgctcatcctcctcgccatcacgctgtatgtcgtgccggagattttcaagtctttagaacttatcggcgagacggcgcgcgtgaatattccggtgtatgtagaccagattgccaaatgggctgacgagctttccaagcagtttgacctcgatttttccacgatggtggattcgttgaataacttcaactggtcttcgattttatcgggcgcaacggagtttacgacgaactttttcagctcgcttgtgaacgtgaccgtgaatgtggcgagcggcattttcacgtttgtgctctccgttatcttctccgcgtacttcctgacgagcaaggagagcctgctgctttccttaaagcgtgtctcctattccctgctgccgaaaaaggtggtggcaactctggcagacattgcggtaacctcgaacaacgtgttttcttcctttgtgcgcggccagctgacggagtgtatcattttaggctgcctgtgcttcatctgcatgtcgcttatcgggtttgactacgcgctgctcatctcgtgcattgtgacgatcactgcgttgataccgattctcggcgcgtacatcggttgcggcatcggcgcgtttttactgctgatcgtaaaccccatggatgctgtatggttcgtcatcttcttcatctgccttcagcagtttgagggcaacctcatttacccgaaggtcgtgggctcgaccattggtctgccgggtgtgtgggtgatgaccgccgtgacgatcttcagcaatttgttcggcattttgggcattattctcggcacaccgatcgcagcggttctatacacggtgatgcgccgcgtgacaacgaaccgccttgcggcgcgcgggctttcaaacgctgatttagaaccgggcaaatacccatatctggaaaactctcactacgcggcggggtattctaagggccgcccgctgtgcgcccccgttttggaacgcgcggcaaagaaaaaggaacagggtaaaaagccgctgttcccgaagtttaaaacgagcaagaaaaagtgatttttcggcgctgtacgggaacccgtacggcgctttttatatgcaaaaaggcatacggcaaagcgtttttcgcttaccgtatgccttttgttttgcggaaattaaagcgctgcgatgacttccacttcgacgaggacgttcttcggcaaggtcttgacggcaacgcaggagcgtgccggcttttcggtgaaatacttgccgtagacagcgttgaacgcggcgaaatcgcccatatcggcgaggaagcaggtagtcttcacggcgttttcaaacgtggtaccggcttcttcgaggacggcggcgaggttcttcatgacctgctctgcctgctcggtgatgtctgcaccgtggatgtcacccgttgcggggtcgatcggaatctgaccggaggtgaagagcatattgccgcaaacgatggcctgcgaatacgggccgatggctgcgggggctttctttgtatcgattttcttcagcatgatataacttcctttcgtcacacggcatcacgccgcgtttatattcatcatagcgatttttggcgttttcgtcaagttttgcttttttactcggcgagggcgtagaatgcttcgctgtatttttcggaatcgtccgccatgatgagcaggacaaggtcgccgacgctttccacgcgcacgtcgttcgggttgacatccacgcagatccacttggcggggttcgcgctgcggcggatctccgctttcagctcgtcgatgtcggtaccgtccttgacacgcatgaggcaaacggaaaacgcgatggcgttgataaacggctcgctcgcgacggcttcttcaaaatcgagattttcgacgccgaagtagtacgcagactggtctttcggaatctcgaccgtgccgacgctgtttttgagaaaatcgcgctgctcgtcatcgacatctacggtgtcatacaggcggtctataatctccggcagcgtgcccgagatggttttgccgctgtctgttgtgctgtttccgctggcgcaggcggcgcaggcgaaaagcagcgtgagcacgagcaggagcgccgtaagctttttgggttttctcatggtaaatttcctttccggttttaaaatcgaaggggaagtttagtattttgtggcgtagtagtcgatggcttcatcgatggtgccgtcaaacacgatctttccgtttttcatcacgacaccgcgggtgcagaacgctttggcaatctccggcgaatgggtgacgaacagaagcgtgatgtcgccctgcatgatctccttcacctttttggtgcacttatcgcggaacgcgcggtcgccgacggacagcgcctcatcgacgatgaggatttccgggttgatgttgacgcagatggaaaaaccgaggcgcgctttcataccgctggagtacgtgcgcacaggctggtcgatgtattcttcgagctccgcaaaatcaatgatggcaggctcgagctttgcgatgtcttcatcgttaaggcccaaaatgcggcccttgagataaatgttttcgcggccggtaaattcctggtcaaagccgcttgtgagctccagaagcgcgctgacgatgccgttgacgtaaatttcgccgcttgtggggaacgtgacgccggtgatcattttaagcatggtggatttgcccgcgccgttgcgtcctaaaatggcgacggcttcgccgcgctcaacggtgaggttcatatcgacgacggcgtgctttgttttgtgcggcacgcttttgaaaaacagccccaaaaggcgacggcggctgcttgtatacagtctgtacgttttgcagacatttttaaaacggacggcaatgttgttttgttcgctcatgcttttgccctccttacagtacgtccgccatttcactgcgggtgcggcggtagctccagatgccgagtgcgtaaatgacaacgagccagacggcgaagtacaaaaggcgtttcggctggtcaaagaaccacgtgtggtaaatgaagcagttgcggtagccgttgcacaggaacgtgacgggattcagcatcaaaagcttatgtgcgaggcccttgtgcatggtatcgacctggaaaagcacgccggaaagccagaacaccgctgtaacgaacgatttgacgaggtttgagaaatcggtgctgatggcggcgatgggcgcggcaaacatagcccagccggtgaagaacaggaaattgcacagcatgtaaaacggaagctgcacaaggtagatggtcaattcgttgccggtgataacgaagatgaagatggtgatcaccatcaagatgaggtgcacagagaatttggagatgctggtaaacgtcggaatggtggagaccgggtatttcatcttggtgacgagatagcggtttcgcaaaatacactcggtgccaagcgtgagcatttcgctcatataaaaccacggcacgatgccgctgatgagccacagcacgaacgggtagccctcgatatcgccgccgcggcgcaggccgatggcaaatgcgaaccagtaaacgaaaatcgtgacaagcggcttgatgatggcccaagaccaaccgagtgcggacgcacggtatgtgcggcgcaggtcggagcccgcaagcttaaagatctgttttcggtaatcaatgtgatcccgaacgatggtgacgatggtttcacccaccgaaggtctggtggatttgatttcaaaagatgaggccatacaggccgcacctcctttcccgcgcagcgcgcgtacctaaaaaggcattccgaaaatatggtgaataggataggcttactgcccggccttcttccagtccgcaggcagtatcgcttttgctattatacacgttttgcaggaaaaatcaaccgttttcgacacgcggcgcggcgatgcacacggcatccttgacacagcggatgacggtatcgatgccgcctgcggcgtattcgccgtctattgaccaatcaaagcccgctgcggcatgcaggcggaacgtgctcgcggaagcgaaatcgatgtgcttgtccgaaaaatcgttgtttttgagcgccagaatgaggcggtgcaggtcagggagcgtttccggcttgcgaatgagaagcatctcgagcttgccgtcgttcatatcgacgctgttttcatcgtatttcagcatgccgccgatggaaagcgagttgctgaacgcgccgaaaatgtacgcgccctcgaaaaatttgccgtctgccgtgacggtgaggggcgtggcgtcgagcgcgtggaggtccttcatgccctctaagacatacgcgaagtggcccaaaaggcgcttcatggtacgcggcgtggcgtaggagcactttgtaaataagccgaacgacgcgacataggaaaaatagccgtcgccgaatttgccggcatcaatgaggcggtcttctgtttccgtaaagctcttatagggatctaaaagatgcttttgaatgccgagcgtctgggcaaaatcgtttgtggtaccggcgggcagatatgtgatgggcgtgcgcagcgcgcggtgcagcatgccgtttaagacggcgtttaatgtgccgtcgccgccgagcacgacgacgcgggcatagtcgttttctgcgagctttgcggtgtagccgcttccgttttccgtttcggtcgtttcaaagcggtcaacggcggcgccgttttccttcagccacgcttcaagcttatcggcggtatgctcgccgccgatgcggcccgaaacgggattgacgatcattaaaatgtgcgcgccgcgtaccggctcgtattccaaatttttatccatttctctcaccctttacgcacaaatttattcataaacattatacgcaaatacgggggaaaaacggtgaacaaaatttgaatttaggacacacaaacatagaaaaaacgccgccatacgggaaaaagtcgtacagcggcgcttatgtgtctattcggtttaaaatcagcccttgagctctacgcggcggattttgccgctgatggtcttcggcagctcgtcgcggaactcaacgatacgcgggtatttgtacggtgcggtgttcgtcttgacgtaggtctgaatctcttttttcagcgcttctgtgccctgcgtgccctttgtgagcacgatggacgccttgacgacctgcccgcgaatgggatccggagcgctggtgacggcacattcgagcacatacggcagctccatgatgacggattcgatctcgaacggcccgatgcggtaaccggacgacttgatgacatcgtctgttctgccgacatagaagaagtagccgtcttcgtcgcgccatgcggtgtcgccggtgtgatacacgccgccgctccacgcttcgcgggtcttctcttcgtcgcggtaatagcccatgaagaggccgcagggcgtgtgcttatcggtacggatgacgatctcgcccgtttcgccgaccggcgcaggcgtgccgtccggcagaatgaggtcgacatcgtaaagcgggctcgggatgcccatggagccgcttttcggcacggagccgaccgggttgtaaatggaaagcgtggtctccgtctggccgaagccctcataaatggaaaggccggtggcgcgcttccattgctcgtagacttcggggttcagggcttcgcctgccgtggtgctgtactcgatggaggaaaggtcatatttggagagatcttccttaatgaagaagcggtacatagtgggcggcgcgcagaacgtggtgatgttgtactgcttgaacataggcaagatgtcgtgtgcatcgaacttatcaaaatcataggtaaaaatgggcgcttcacacatccactggccgtagagcttgccccacagcgccttgccccagccggtatccgaaatggtgaagtgcagcccctccgggttgacgttgtgccagtatttggcagtgatgtagtgtccgagcgcgtatttatagttgtgctccgcgatcttcgggtagcccgtggtgccggaggtgaagaacatgagcatggggtcactgccgcaggcggtgtcctctgtacgctcaaacacatcgctctgcttttcaacctcggcgtcaaaatcgagccagccctcgcgtgcgccgtttgccatcatcaaaaattcgacggtgccgcagtttttggcggcgcgcagggcttcatctgcgacctgaccgtccggcgtgcagacgagcgcgcgcacgcctgcggccttgaagcggtaatcgaggtcgtgctccattaaaaggttcgtcgccgggatgacgacggcgccgagtttatgcagcgccaaaatggcgaaccagaactggtagtggcgctttaagatgagcatgactctatcgccgcgcttaatgccgagggacttgaagtagtttgccgtcttattcgacatgcgcttcatatcattaaacgtgaagcgcttttcctcgtggtgcttggagacccagagcatcgcaagcttatccggctctttttccgccattttatcgacgatgtcgaacgcgaagttaaacttttcctcgttcatgaaatcgatggattttaagatgccgttttcgtcaagctcggtgtgcacgaacgggcttgcgaccgtttcgtggtcggcacggtcctgtttggccttgatgagcgcctcgaacgtgtccttttcgggctttttctccttctgcgggcgcatgacgacggcgtagagggtacattcctcgccgccgacggcgatcataccgtggggcgtgccgctgttgtagtaaatggaatcaccctcgccgagttcttcgatgtgcgagccgatctgcacgcgcattttgcccttgatgacgatgtccatttcctgcccctgatgggtggaaagcttgatcgcaaccttctgctccgcctcgttatacggcatggtgacaaaaaagggctctgccgttttgcccttaaagagcggggcaagatttaaatacttaaagccctgacggcgcgtaatgggcaggccctcgccgcggcgggtgacggtatatgtggaaagtcgcgggcttgtgcccttgatgagatcggtggggtcgataccgaagcgctctgcacatttaaaaataaacgtgaagctgaaatcatgctcgccgctttcaaagccgcggtattcctccagcgtgacgccggtgcgctgcgccatttcttcttcggaaaggccgatgatctcgcgcatggtgcgaatgcgctccgccacctctgcgagctgtgctttcaggtctgttttttccgttacgggggtttgtgcttcatttgccaatttcttcattcctttcgttttggtatggctatatcgatagttttgttgtttttcatgcaaaaaactccgtctcaaatcgctttgagacggagttgatccgcggtaccactcaaattgcctgaaaaggccactcacgggctcccatgaagccctatgcactgacgcagcatggcgcggaaagccctactcgggttcactttggggctttccgctcggaagggattgtgacagggcttttcgtatcggcttacacccgccgccgactctctgaaacgggaaagcccgcactgtcttcgtcatcgcttttatattttctctgtattatatgaggtatatctgaaaagacaaaacttgtttttagatatattcttatcttatctggttttcatttcaatgtcaattgttttttcaaaaatttcaaaaagcttcacacttttgcggtctcacgcacttcgcgcataacttactccttcaaaacgtgaaataaataataaaagccggataaatacaggcattgcagcccgcattttatccggctttctgtttcgtgtgaacgggtcgccctccgataaacatttaaccgtttatctttgaactaccttattttaataaaatgaaaatatcaatgacactttacgcgcgatgtgcggcttctacggcgtcagcggcgttatcgagaaggccgtcacccatgagctcgatggcaccgcgatcgcacagggaggcgatctgcgagtcaagcgggagcttatcgagcaccttgaggtcgtactttgccgcgacctcgtcgatgtggctttcgccgtaaaccttgaacggctcaccgcagcacgggcacttgacatagctgtaattttcgatgaggccgagcacgggcacgttcatcatttttgccatttcgaccgctttggagacgatcatggagacgagctcctgcggggaggtaacgatgatgatgccgtcgagcggaatggactggaacaccgtgagcggtgcgtcgccggttccggggggcaggtcaacaaacatgtaatcgacttcattccagatgacgtcgctccagaactgcttgatgacaccggcgatgaccgggccgcgccagacgaccggggaggtctcatccggcagaagctcgttgatgctcatggtctcgatgccagtctttgtgttgaccgggaacaggccgtcatcgctgcccatggccttttcgtggatgccgaagcacttcgggatagacggaccagtgatgtcggcgtcgagaatggcggttttaaagccgcggcgctgcatggtaacagccaacatagaggtgacaaggcttttacctacgccgcctttgccgctgacaacgccgatgacctttttgacattgctcatcttattcatgggcgcaagaaagctttccggactctggcgggaaggacattcctcgccgcagctggagcagtcgtgcgtacaattttcgctcattgctgatacttcctctcaaaaataatgtcttttttcgtttgtgcggtaagctattccaccgcatcaaacaggatatttcggtctttttattctaccctgttctttcgcttttgtcaagattttgacaagccatggaactgcacagttaagctattcgtgcgtatcgttcgcaacggtgggcgttaaaaacgacagaagaaacgcgagcgccaaaatgccgcaggaaataaacatggtttttgggaatgaaaaattttcccgtacctcggttttcgatttcaagatacgggaaattttaatttcaggcttcgtcaaataatttttcaaagcgaacagcggcggtgtgcgggtctttcatgccctcaaacacgttttccgcgttgaacttttctttgaggtaatgatcggcctccagcgtgaaccagcctttgtaaccgatctctttgagcgcggcggcgatgggcgcgaaatcaatggacatggagaacgggatctggtgggaatcgtgccaacggtcgttatcgtgaatgtgaagcgcctgcaggcggtggcccagcgcacggatcatgttcgccgcgcctgaaccggagccgcgcatttccgcgtggccgatatcgaggcatgcgacgagatacgggtcatttacggcgtcgatatgctcgatgaagctctctgaggtggcgcatgccgcaaagcaggactcgtctttcgcatcatcccagttccacatgttttctgtggcaatcttcacgccgcagtccttcgcaaacggcaacagttcaaggtacatttcggcattttctgcggcggatttgtcgttatccgggtgaatgatacagatcttgccgccggcttctgccgtgcattcaatcgcgcgcttgaaatacgagcgaatctccgggcaggatgtcgggaacggcgcgtgcgactggttgcaggtgatgccgttatcgaggccgatctgcttcagcttgcgcgcaaacgcgagataattttccccggcaagcggatgtgttgtggggcggactgcgccgagtcgccaatcgtaatcgcacatggcaaacatggaaaaatcccaggcgtcaaacccggcttttgcgacatattccacggctttttcttcgccgaccagaacggacgcggtttcgatttgtgtggatgttctcatgaaaactcctcccttttatcgccattatagagccgaaaaaggggcttgtcaagccagtctttcggcgtttggtttgtggaaaaagccgaaagcactgtacaaaacgacacaaaaacgaccgcccgatttagaaccgagcagccgttcatagagtttgcttaataattttccgcgtggacctcaaaatagctctgcggatggttgcagaccggacatacctccggcgctttgacgccgacgcagatatgaccgcagttgcggcactcccacacttttacctcgctcttttcaaaaacatgtgcagtctctaaatttttgagcagcgcacggtagcgctcttcgtggtgcttttcgatctcgccaaccattctgaattttgcggcaagctccgggaaaccttcctcttcggcggtttttgcaaaaccctcatacatatcggtccactcgtagttttcgccgtccgcagcggccccgagatttgctgttgtatcgccgatgcccatgagctccttgaaccacatttttgcgtgttctttttcgttatcggctgtcttcaggaagagtgcagctatctgctcgtagccctcttttttcgcgacagatgcgaaaaaggtgtacttatttctcgcccgcgactcgccggagaatgcctcttgcagatttttctcggttttggtgcctgtatacttgtttgccat

SEQ ID NO: 36 - DNA, 15736 bp, unidentified
  source 1..15736: mol_type = unassigned DNA
atgaaaaaaggaaataaatacggaacgcatagagtaatttcaccgaaaggagtattgccacaaccagctgataaactggataacaatatggacgaaatctatgataacgagattttgatcgatgtgcaaactctgaatatcgattcggctagttttactcagattgaagaacaagccggaggggataaagctaaaattgccgagatcatgctgggaattgtagagaaacaaggaaaacaccgtaatccggtgaccggttccggtggtatgttactgggaacggtggaaaaaatcggagatgctttagttggaaagaccgatctgaaagtgggagataaaatcgcaactttggtgtctttgtcgctgactccgcttcgtatcgataaaattaaagaaatccgggcagatgtcgaccaggtagatatcgatggtaaagctattttgtttgaaagcggtatttatgcgaaaattccgtcagatctgccggaaaagttggctttgtcggctctcgatgtagccggagctccggctcagactgctaaattggtgaaaccgggagatacggtattgattatcggtgccggtggtaaatcgggtatgttgtgttgctatgaagcaaagaaacgtgctggtgttaccggtaaagtaatcggtttgtgccatagccagagaagtaccgaacggcttcagaaattaggcttctgtgattatgtattctcggccgatgcaactcagccggttccggttatggagaaaattgccgaactgacgaatggtgaaatgtgtgatattacgatcaataatgtgaatattacggatactgagatgaccagcatcttgtgtactaaaaatgacggattggtctatttcttctctatggcgaccagttttacgaaggctgctttgggagcggaaggtgtcggcagcgatgtgactatgatcgttggaaatgggtataccaaaggacatgctgagattacactgcaggaacttcgtgaaagcgaggcattacggaagatatttacagagttgtatgcctgaatggtcgggattttataatcccgacgaattaaaaatatgtttttatggctagcagaagaaaagagtttttccctgaagtgaccgatgaacaatggaacgattggcattggcaggtgaagaacaggattgaaactttggatcagctgaagaaatacatccggctgacaccagatgaggaagagggtatccgtgagtcgctgaagacattacggatggcgatcacaccttattatctgagtctgatcgatcccgataatccttattgtccgatccgtaaacaatcggtgccgaccattgaagaattgcatcggtcaccggctgatctggaagatcccttgcatgaagacggtgattcacccgtaccgggactgacccaccgttatcctgaccgggtgttgttcctgatcaccgatatgtgttcgatgtattgccggcattgtacccggcgccgctttgccggacatcacgattgtgccactccattggaaagaatcgataaatgtatcgaatatatcgctaataccccccaggtgagagatgtcctcctatcgggaggggatgccttattggtcagtgacgaacgattggaatatatcatcaaacggctgcgtggaatccctcatgtcgagattatccgtatcgggtcgagaacaccggtggtgttaccccagcgcattacgccggaattggtaaatatgcttcggaaatatcatccgatttggctgaatactcatttcaaccatccgaacgaaattaccgaagagtcggcggctgcttgtgcccggctggccgatgcgggtatacctttgggaaatcagtctgtcctgctccgcgggatcaacgattgtacacatgtcatgaaaaaattggtgcacgagttggtcaagatccgggtacgtccctattacatctatatctgtgatctttctgtgggtatcggtcatttccgtacccctgtatcgaagggaatcgagattatcgagaacctgcggggacatacttccggttatgccgtgcctactttcgtcgtggatgctcccggtggaggcggaaaaattccggtgatgccgacctatctgatttctcagggccccaatcgggtggtgttgcgtaattttgaaggcgtggtgactacgtataccgaaccgacggattacagagacgaatgccactgtgaagagtgtgagaagcgccgtaaaacagaaggagtggctgagttgctgagcggagaacgcttgtctctcgaaccggcgaatctggatcgtaagacacgtaatctattggcgaaaggataaattatttgtgattttggatttaccgtttcattcgattgaaaggataaatccggaatcataaatgaaaatgctgaacagatgggttttgttgatgacatatccgattacaggagtctggcaattgtcggattggagaaaaatacagggaaaacagaatgcctgaattacatccttcgcaggataaaagattcggcagatcggttcgctctgacttcgatcggaattgacggagaaaaccgggatcaggtatgtcaaaccccgaaacccgagattatcgtgccggaaggaatgatattcgttacctcggagaaacattaccgggagaggaggttggtggctgaaatcatggaaatcgatgatcatcggactgctttgggacggttggttatcgccagggctaaaacttcgggaaaagtattgctttcagggcctgcggatactgccgggttgaaaagtctgatccggcatatgaaagatttcggggtacgaacgaccttggtcgacggggctttgtcccgtttaagcctggcgtctcccaccgttacggaggcgatggtcttagcgacgggggctgctgtttccgggaatattcgggaattggtgagacgtacccgttatgtttgtgatttgatcgatctggaagaggtggacgaagttttacaagagaggttggatgccattcaacaaggtgtatgggcggtcgggccggagggagaatgtatcgatctgaaattgccttctgtgtttatgctggagaaaagtggaaccgatctgctgcaatatgggcatcggatctttattgccggtgctgtgagtgataaagtatttcagtttttacgcgtacagaaacagaccgtagaattgatcgtccgtgattttaccagtgtttttgccgcacctgagtctttttatgcctttttacgtaagggcggaagagtacaggtgcttcatcgtagccggcttttggccgttacgatcaatcctcagtctccgggaggattacttttggattcgttgcgtttgcagcaagcattggaagaaagcttgcaaattccggtgtatgatgtgaaaaaaatagaaaaagtcggtaaaaaccgttgaggatatgattttaagggaagcgataagacaagtcaggggattccgttatatgatcgaacaattggatatctgttcggctgtaggccggagggtattgtatgatctgccctggctcgattcgaaatctcggttggaggccgaatttgaacgtattcaaaagatcatggtactttttgaacaacctgaaaatgaatcccggctggaacgtttgactggtaagctgatgcaggtgagagatatccgggggacgatcgggcggatggcgatggagcaagtgttggatgatcttgaattgttcgaattgaaaacttttgctttgtgctcggaagaaatcagggaacttgtcgaagaatggcggattgttttactcccggaactggagccggttgtacgtttgttggatccggaagggaatcggattcctcatttttatatttatgatacttattcggctgagctggccgggctgagagctgaaataaaacaaaagagccttcaaggggcagaagaacgggaattagaagcgttgtatgtacaaagtgtggttttggaagacaaggtacgcgaagagttgtctgtgcagttgagaccttatcacgacgatttgaaacaggctttggaagcggtcggattgctggatgtcgtattggcaaaagccagacaagcaataagaggacaattgactttgccgcaaattccggaagagggggaaatggtgttcgaaggtcttttccatcctcagatccgggagattttagaacaggaaggaagagcgtttcaggctgtagatttgaaattggaaaagggaacgacggtgattaccggagccaatatggccggaaagacagtgttgttgaaaagtgtgcaattggcgcaatacctgatgcagttcggtttttatgtacctgcccggcgggcgggtatgccgctcgtggaacaagtcttgaccagtatcggggatgatcaggatgaattgaacggtctctcttcttatgcggctgagatgttgcgggtggatgaaatgatccggcaagtcaggcagcgaagtaaaattttggtgctgatagacgaattggcccggacgaccaatcccgtcgagggacgggcaattgtgaatggggtagtggattttttgactactcaccgggtgatggctatggttactacccattatagcggaataacggccgaatgccgtaaattgagagtgcggggatttgtagagaatcgggttgaagggaatatgaccctgaaaaatatcaatgagtttatcgattattcactcgaagaagacagcggagaagaagttccccaggaggcgatgcgtattgcctggatgctggggatcgaccgtggagtgttggaacgggtggaaaattatttgcaggaagaaaatcctgattggaaaaagacagtacagtagaaagaaaatatatatgaaaagtaaattaggaatagattttgataaagtcggacatgcccgtgaaatggcccgtaagattgctgaccaggtgcaggattttgtggatggctatacgacagtggctgtcgaaaggacattgtgtcgtttgctgggtatcgacggagtggatgttcatgctgtccctctgccgaacattttggtagacgagctgaaagaaaagaacgtgttgggagaaggaattttattctttctgggtaatgtaatggtggaaaccggaatgactccgcaggaaatagccgaacaagtggctgccgggaaagtagatgtcacccgggtaccggtatgtactcccggccagcgggaaaaagcgttgcaaccctatatcgaggccagtatccgtcggatttccgacaaccggaaacggcgtgagaattatatcgcaacgatcggagagggagcaaagccttatctttatgtcattgtcgctaccggtaatatttacgaagacgtggtacaggcacaggcggctgcccggcaaggggcggatgtcattgctgtgatccgtacaacggggcaaagtttgttggactatgtaccctatggggctacgacagaaggattcggcggaacttttgccacccaggaaaattttcggattatgcggaaagctttggatgaggtaggagaagaagtcggtcgttatattcggctgtgtaattattgttccggtttatgtatgccggagattgctgtgatgggagctttggaagggctggatgtgatgttgaacgatgcgttgtatgggattttattccgggatatcaatatgcagcggacgttggtcgaccagtttatgtcgcgggtgatcaacggctttgccggagtgataatcaacacaggcgaagataactacctgactactgccgacgctgtcgaagaagcacatactgttttggcttccgatctgatcaatgaacaattggctttattggccgggctgccggaagaacaaatgggcctgggacatgcttttgaaatggatcccatgctggaaaacggctttttgtacgaattggctcaggcccagatgacccgggaaatttttccgaaggctactttgaaatatatgcctccgacgaaatttatgaccggaaatattttccgcggacatattcaggatgctcttttcaatatgatcggaatctggacttcacaaggtattcaactgttgggaatgccgaccgaagccatacatactccatttatgtcggatcgttatctgtcgatcgagaatgcccgttatatttttaataatatgaaaaatatcggagatgaagtggtctttaaagaaaacgggattatacaaaacagggcgaaagaagtgttggataaagctaccgttctcttggaaaagattgaacgggaaggactttttacagccttggaaaaaggaatttttgccgatatcaagcgtcccaaaaacggaggaaaaggcttggacggcgtttgtgccaagggaaagaactatagcaatccttttgtagagattatgatgaacagataacaaaaatcgtaaatcaaataaagattatgagcggaggtttatattcaacagaagggagagatttcgatcaaaccctcgatctgaaaaagataaaaccctacggggatacgatgaacgacggaaagacacagctgagtttcactttacctgtacctgccggagatgaagcgatagaggctgctaaacagttgatgaaaaaaatgggatttgaaaatcctcaggtggtgtttcatcaggaactgacgaaaggatatactttttttaattgttatggaaattgtgtacacacggtagattatagccatatctatgtgccgaaagtggaatcgaccaagtgggatatgggagagaccgatcagtttgtccgggaacatatcggtcggaaaattgtggtgatcggagctagtaccggaacagatgcccatacggtgggaatcgacgctattatgaatatgaaaggttttgccggacattatggtttggagcggtatgaaatgttcgaagccttgaatatgggtagccaggtgaccaacgaggaatttatcgctaaggctatcgagttgaaagccgatgctttattggtttcgcagaccgtgactcagaaagatattcatattaaaaatctgacggaactcgtggagatgttagaagccgaaggattacgggacaaagtgatcctggcttgtggtggtccccggatttcacatgagttggcgaaagaattggggtacgatgccggcttcgggatgaatacctatgccgacgatgtcgcctcgtttattgcgcaggaattggatcgaagaatgaatcattgaaaatatacaagctatggaaaaagaacaaatcagggaagtgattgccaggagagtggcaatggaactccacgatggagacgtggtgaatctgggtatcggtttgccgactttagtaccgaattatctgcctgaaggtgtcgaggtcattttacaaacggagaatggattgatcggtatggggccgactcctgctccgggagaagaagatccggacttgatcaatgccggcggtggagcgataacggctctgcccggagcggccagcttcgatagtgctacttcgttcggtattatccggggcggacacgtagatgtcagtatcctgggggccttgcaagtagatgagaaaggagatttagccaactggatgataccggggaaaaaaacaccgggaatgggtggagcgatggacctgctgatgggagccggtaaggtgatcctggccatggaacatacggcaaaaggaaatccgaaaatcctgaaaaaatgtactttacctttgacagccaaggggcaggtgaatatgatcgttacagaaatgggagttatggagatcacacccgggggaattgtactgaaagagatacatcctgagtttacggtagaacaggtgcaggcagctacagaagcaactctgatcgttgccccggatttaaaaaagatgtgctgaacgacgaaagcgtattgaaggaaatcacgatggaggatggatggtggatacctctagcccgaatcgtaaactataaattaaaaaaggtatggatttttcattatcaaaaaaagagatattgtttcagcagatgatcagagcatttgctgagaaagaagtaaaaccgctggcggcagaagtggacgaagaagagagattccctgtcgaaacggtagaaaaaatggcgaaactggggattatgggtatccctttcccggtggaatatggcggagccggtggtgataacgtattgtattctatggctgtagaggaattgtcccgggtatgtgcaacgaccggggttattgtttctgcccatacctctttgtgtgcttctccgatctatgaattcggaaatgaagaacaacggaaaaaatatttacccaaattatgttcgggagaatggatcggagcttttggtctgaccgaaccgaatgcaggtaccgatgcctctgcccagcagacgatggctgttgctgaagaggatcattatgtgctcaacgggtccaaaatatttattacgaatgcagcttatgcacacgtttacattgttatggcgatgaccgataagtcgcagggtacacgaggaatctctgcttttatcgttgaacgggattttccgggattttccatcggtaaaaaagagaaaaagatggggatccggggatccgcaacctgtgagttgatttttgaaaattgtattgtgcctaaaggaaatatgctgggtaaaccgggtgaaggatttaaaattgcgatgaagacgctcgatggcggacgtatgggaattgcttcacaggccttgggaattgctcagggagccatggatgagacaataaaatatgtgaaagaacggaaacagttcggacgctctatcggacaatttcagaatacccaatttcagttggccgatttaaatgccaagatcgaagctgcccgtttgttggtgcggacggctgcctggaagaaagacaggaaaatcccttactctgtcgattcggcacgggctaagttatttgctgctgaaacagcgatggaagtgacgacaaaagccgtacagttccacggagggtatggatatacccgtgagtatccggtcgaacggatgatgagagatgccaagattacggagatttatgagggaacctctgaagtacagcggatggtgattgctgctgctctattgaaataataatgttttccgcattgaacttataaaaagagaatacatgaaaatagtagtttgtataaaacaagtacctgatacgacagagatcaaactcgatccggtaacaggaacaatgatacgggatggtgtacctagcattatgaatcccgacgataaaggtggattggaaatggctttggccttgaaagataaatatggtgcgcaggtaaccgttattacgatgggaccgcctcaggccgacgatattttgcgtgaagcttttgccatgggagccgaccgggcgattcatttgagcgaccgtaagtttgccggtgcagatacattggctacgtcgaatgctattgccggtgctttacggatgctggatttcgacctggtcattaccggccggcaggcgatcgatggagatacggcgcaggtaggacctcagattgccgagcatctcgatttgccacaagtgacgtatgtcgagaatttggaattcgatggtgacaagttgtttacgatccgtaaatctaccgaagaaggatatcaaaccgtacaggtggaatctccctgtgtcgttactgttctggctacggcaaacaaagcgcgctatatgtctgtgcggggaatcgtagaggcatacgatcgggaagtggaaatctggaattttaataatatcagtgtggatgaagctaaattgggattgaacggttcgccgacgcgggtatggaagtcttttaccaaaggagctaaagcagccggaaaagttttcgaagtggaaccggccgaagctgtagatgttattatcgaaaaattgaaagagaaatttattatttaatacatgattttagaggaaaaccgggaataatccggtgaaatctaaagtttaaaatctgatgaagatggataaatctcaatataaagacgtttatgtattcgtagagcaacgggaaggagttattcagaaagttgccatcgaattattggggaaagcccgggagttggccgatagcctgaatgaaaaagtggtggcgatgttgttgggttatgaagtggagggtcaggcacaggaattgatcgcttatggggccgatgtcgtattgtgtgctgacgaacgggagctggtacaatataataccgagccttacgctcaggcgattacacagattgtacatgagcgtaaacccagtatcgtactgattggagcgacgacgatcggccgggatttgggccctcgtttatccgcccgtttagagaccgggttgacagccgattgtacgggcctcgctatctcggatgaacgggatttgctgatgacccgtcctgcattcggaggaaatctgatggcgacgattatttgtaaagaacaccggccgcaaatgtcgaccgtacgtccgggagtgatgcgcacgaaaccgaaagatgaacaacgtgccggaacggtagagaaggtgaatattcatttcgataagtcgaaatttaaagtgcggattctcgagacggtgaaagaacaaaagaaccgtatcgatataacagaagcgaagattctcgtatccggaggccgtggtgtaggtaatacggagggatttgagatgctcggaaaattagcggaaacgctgaatgccgaggtttcttcttcacgtgccatggtggatgccggggttatgcctcatgaccgtcaggttggccaaaccgggaaaaccgttcgtcccgatctgtatttcgctatgggtatttccggagctattcagcatttggccggaatggaggaatcggaatttatcgttgccgtgaacaaggataaatatgctccgatttttaacgttgccgacctgggaattgtcggggatgtgaaacagatcgttccgttgctgaccgagaggttggcaaacatccggaaaactgacaaataaaagcccggacatggagtatcaaaaattaatgctggaaaaacaagatcgtgtttgtctggtaaagatcaattatccggaggcattgaatgccttgaatacggtgatcttgcaggaattggaccgggcattcgatgaaattgcagccgatccggaaaccgatgtggttattctgacaggcgaaggacgttcgtttgttgcgggagccgatattgctgaaatgagtgtgatgaaggccgaagaaggccggcgtttcggtgagttaggggctgctgttttccggaaaatcgaactgatggctaagccggttattgctgccgtgaatggatttgctttaggaggaggatgtgaactggcgatggcttgtgatatccgtatcgcctcggctaaggcgaagttcggtcagccggaagtgggacttgggatcacgccgggattttccggtacccagcgtttaccgcgtttagtcggattaggtaaagccaaagagttgatttatacggctgcggttatccatgccgaggaagcttgccggatcggactggtgaacaaagtggtggaaccggaagaattgatgaatgagtgtatggctatggcaaagactattgctgctaaagcgccattggcggtccgttatgccaaagaagccatcaaccggggagtggaaacggatatggataccggtatcgtcatcgaaaacggtttgttcgggttgtgtttcgcaacgaccgaccagaaggaaggcatggaagcttttttatggaaacgtaaacccgaatttaaagggaattaaaatctttgtaatttaaatttatcgattatgaaaatatgcattgttggaacagggactatgggacatggtattgcccaggtatttgcccaggccggacatgaggtattgttaaaaggccgttctgaagcttctttggcaaaagctcacaaagctatggataaaaatctttccagaatggtggaaaaaggtaaattggaagccggggttaaagatcaggtattggccaggattaaagatacgatgaaatatgaggattgtgccgatgctgatttggtgatcgaggcgatagctgaagatatggctaccaagcatgagatattcaaattgttggacggtatttgtaaaccggaagcgatattggcaaccaatacttcttcgctttctataacggaagtggccgctgtgactaaccgtccggaaaaggtgatcggtatgcatttcttcaatcctgttccggctatgaaactggtggaagtgatcaaaggccggctgacttcggcagaggtgcatgatcaggtatttgctttatcgcaggaaatcgggaaagtgcccgtcagtgtcgaggaagctcctggatttatagtcaaccggattctgatccctctggtgaacgaaggcatcggtatattagctgacggagtggcgaaaaaagaggaaatcgatgccgctatgaaattaggggctaaccatcctatgggaccattggaactgggtgatttgatcggattggatgtttgtctggctattatggaagtgttgtaccgggaattcggtgactccaaataccggcctcatcctttgttgcggaaaatggttcgcgctaacttattgggacggaagaccggagtcgggttttatgactatcggaaataatgaggagagtcttctttaccgggatacgatgttggggaatatttccccaacatttttactttttccccactttctacaagctgcgattcttaatctgttgtatgtaatgtattgataattagtgtattttgttgattttgtgcttgtggcatcggatttgttctgtttaaggataaaatctaactctaaaaaataatagtatgaaaaagatcgtcattttaggaatcggagcttctatgttcttcctgggtagttgcgtagagagttctcagaaatataagtctttacaagcccgtctggattctttgagtacagtacatattatgcagaattccgaaatggagagtatgctggccgatttgaacgatatttctgccggaatgcaatcgttgcgggatgccgaacgtttattgactttggaaacaattaatgaaaataaagacaatagtaaatccaaacagcaattgaatcagctgaaaaaagacgtacaggctattaccgaggcgatcgcttcttataaagaacagatttccaaactcgaaggtaagaataaaagccagtcggccgagtttaagagattgattgccggcttaaatgcggaattggatcaacgtacacagaaactgaatgaaattactaaacaattggctgagaagaatcagcaattggcagtgaagaccgaggaagtcgctaatctgaccgagaatgtggaagctttggataaagccaataaaagtcagcaaatgacgatcaatgaacaggatatggcgattcatcagggacactatttgattggaaaccgcaaagagctgaaagaagctgaggtaatttccagacaagggattttctgtccgccgatcgtatcgtcacaagcacaaaaagccgactttaccgatttggatatccgtgagatgaaggtgatcccgttgaatagtaaaaaagcgaaattactttctgtccatccggctgattcctatactttggagaccggtgaagatggtaatatgaccctgaaaatcaatgacgaaaataatttctggaaacaaacaaaatacctggttgtgatgattgaataaaagcgggaataattttaactgagagaggcatacccaaaaagtatgtctcttttcttttttcacaacgattattcttgtcgggagagaaaataatgaaaaaaaactagccgaagatcatcaggatttttaaaagtgtatccgatgagaaaatcgctttcaatttgtcgatacttttgtatttcagtgttttaacactgcttactgagatgtttatttcctgtgctatttgctgattgtcgaggccttgaaaagcgagctgcatgacttgtttactacggggaggaagtttttctatttctgcgagaatctgcatggcgacgtctgcttctacaatgacattgaagatattgacctctttcagaggatggttgtttagatatttagcttgcagcttgcgggttcgcagccattcaagtgaaaggttatgaaccagcatatacatataattatcgatattctcaatatttttgttttttccttgtaattcccagaggcgtgcaaaagcttcctgtacaatatcttgggcagctgttttatcgccaaggaaacggttggctgcgaaacacaaagagacatacagacggttcactaagctttcgaacttggttgcagctgtatttcccgtttgatatgttgtgtttttatccatttttataacatccttttaaggaattgctctacaaatttaaaaaaaattataattccgttcatccttttcgttactgagttagtctttaatatgaattaagagaggaaaatgtagtaaaatagattcagatgaacagagaaagtttaaatatattgttaaaaaaagcctattgtcaacagctttctgaggaagagagggaaactttgaagttgtggttgggagagtcgggagaaaatgcagagatgtataaacggttgatgtcgggacagagcttgacggaatattcggattgggtgactggattcgacctttcccgggcgatggaagctatccggagtaaggtgaaacggaacaggcaaaggagaatccggaaatcagtaagttgggtggctgcctgtgtaatactctgtctgggcataactttcgttttttatttcacttcaatggattcagaacaggtattgacagaacaaatggctgctcagatacagcctggctcggcaaaggcgatattgactttaggggatggacggcaagtggctttggataaaaaacccattgaattgcttgtcaataaacaacaaatggtgacgggagatagtgcgaccttgaattattctattgtattgcccgcttctgagaccgaacagatacaacggcaggaagtggcagaatatcatacaatagaagttcctgccggaggagaatatcatctggttttggctgatggtacaaagatatggttgaatgcagaaagttctctggtatttccggttgaattttccgggaataagcgacaggttattttgaaaggagaagcttattttgaggtggtccggaatgaacatttaccttttgttgtgagtacagtctccggggtacaaatttgtgtattgggaacacagtttaatgtggaagcttacgatgaccgggaaagtgtaaagactactctggtggagggaagtgtagatgtacaggcagggggcgaaaaggtacgtttgattccccatgaacaattgcaatatcataaaaatactgctgaaatggaagtcagggaggtaaatgtacgggagattatcgcctggaaaaacggttggttcgtctttgataatactacattgggggaaattgtaaaaactttgcaacgttggtataacatagaagtagaatttatacgtcctgaattagaacatttgcgtttcaccggtgatttaagcaggtatgactcttttgatgctgttatccgaatgtttgaagatactaaaaaactgaatatgagtgtgatatcgaacagactaattgtcgatagaaaataa

SEQ ID NO: 37 - DNA, 5901 bp, unidentified
  source 1..5901: mol_type = unassigned DNA
tcagcccacaaacacgtatttttccagccggtccatggcctcccgcaccagggaatggggcagggcggcgttgatgcggatgcagtcgccatcgccgaagcccgcgccgttctgccagatgacgccatgctccacgccccggcggcggagatcatccggcgtgatgccgtggctgcggcaccaggccccgcagttgacgaacagcatatacgtcccctggggcagcatcatggtgacgccgggatagcggctttgcaggaagtcccggatataccgcaggttccggtccagcacggcgcacagctggtccacccacgccatgccctcgtcgctgtaggccccggtgagggcgtgcatggacagcacgttgcagtcgttgtagccggacaggtttccctgccgctggacccggcagcgaagccggtcattatagatgatgtggtaagacccgatcagccccgccaggctgaaggtcttggtgggggcatagaaggccacggtgcgctcccgggcgtctcgggagacggactgggtgggaatgtgggtgtgtcccggcataatcagatcggaccagatctcatcggaaatgacggtgcagtcgttggcggcgtatacctccatggccttttccagctcccagcgctcccatacccggccgcagggattgtggggagagcacaggatagccacatggatgtcgttttccttcagcttccggtccatgtccgcatagtccatgcgccagatgccctccgcgtcctgcgtcaagggcgtgtggatgatgggacggcccagccgctccagggtgtgggtgaagcctacataggtggggctgtggaccagaatcggctcgccggggcaggtcagggcctggaccacggagctgacgccgcccagaacgccattttcatagccgatgtgctgccgctccaggccggtgacgccgtggcgcacctgctgccagcggatgatgctgtcaaagtaggcgccgctcagctgaaaatatccgaaattcgggtggtccagccgggcccggatggcctccagcaccggcggcgcggtggggaagctcatgtccgccacccacatggggatccgggaaaagccctccttgggctccaccccgtcataggggatcatgtccagggccagggcgtcccggccccgccggtccagaatggtatcgaaatcgtactgcatggttatcctccgttctccgttccggacaggtggaacacccgccgggtattttccagtatggctgcctccgcagtttccggcggcagatgcttcagccgggcgatctcctccacgatgcgcggcagcagcagggaggagttgcgcacccggctcagggattttttgctgcccgtccagggtacgtccggcagcacataggggctgtcggtctccaccagcagccggtccaggggagcgcgggccactgcgtcccgcagggcctccgattcccggcgcagcagcgccccgccgatgcccagacagaaccccaggtccagataggcccgggccgtgtcccagtccccctggaagcagtggaccaccccgccgggcagctgacgccgcctgcgccgcagcatggccagggcgtcccggtccgccatgcggatgtgcagcaccaggggcagtcccagccgccgggccaggcccagctgataccggaaccacagcagctgggtcagccggtgcttccggggcaggtgatagtccagcccggtctcgccgatggccgccacgccgggctcccgggcccagacctccagctgcctgcgctgccgccaaggggcctgatgggtccgggtggggtgcacgcccaccgccaggcggatgaagtccggatgctgccggtacagggcagcggtccggcggttggactcaaagtcgatggcgggctcgatgcacagggcgacgccgctctcccgcagacggtccagcaggtcctcccgctgtccctcccgggccgtcaggtcgccggtgagatagcggaaggcgccgtcgaagcgtttgtggctgtagtgggcgtggctttcgatgatcatgcgcgggtcctcctctccgggcttacgcttcttccggctcctccggctgtgcaggggcctcccaggggaccatggtggccacgcaccggttgatggtgaccccctgctgatagaatttggcctcgtagtccgtcatgacccccacggggccgtcggcgtggaggtcccgggtgacctgggacagccggaagccgaattgggggatctcctccagggaccactcgaacagcttgtcgttgtcgcttttgaagtggatctcgccgcccatgggcagcacccggcggtataattgcaggaaattgccgtgggtcaggcggcgctttttctggttgcttttgggccaggggtcgcagaagttgatatagatgcggtccacctcgccgggggcgaagaagtcaggcagacaggcggcgtcgccgtccacaaagtacacgttgtgcagccccgcgtcccgggcccgttccatggccaccaccatggcgtcggggactttctccacggcgatcagcagcacgtccggctcggcggcggcggtttccgcggtgaagcggcccttgccgcagcccagctccacccgcagctcccgggcctccggcagcagctcccgccagcggccccgcagagcacgggggtccgccaccagcagggcgccgcaggcttccatccggggcagcagattctttttctttctcatacgcatgggtcatttcctcctgtgcggccatggccgcgaataaaataccaactctatatataccacaagatacacggttctgtaaacgaaaaaaatgctccatttggtgccggggacggttttgtgaccggattatgaacatgtcatattgaaaaatgtgcaaagaaaattcatttcttttgtgaaatatcctgaaaaagaaaaagccgggaaacaagggcttgataatttttagacgagggactataatacaagctgtatgaagagtacgcatgatgggatcgctatgggcggcatcccgtcgcgcgcccgccgctgcggcgggggatcgaagcaaggaggaacgatcatgacgaatgttctgttggaaaagaagggccacatcgccgttgccaccatcaaccggcccaaggccctcaacgccctgaactcccaggtgctggaggatatcgaccagctggtggagcaggtgaaggcggacgacgagatccgcgccctggtcatcaccggcagcggcgagaaggctttcgtggccggcgccgacatcggcgagatgagcaccctaaccaaggccgagggcgaggccttcggcaagaagggcaacgacgtgttccgcaagctggagacgctgcccatccccaccatcgccgcagtcaacggctttgccctgggcggcggctgtgagctgtccatgagctgcgacatccgcctgtgcgccgacaccgccgtgttcggccagccggaagcgggtctgggcatcaccccgggcttcggcggcacccagcgcctggcccgtctggtgggcatgggcatggccaagcagctgatttataccgccaagaacatcaaggccgacgaggccctgcgcatcggcctggtgaacgccgtgtatcccctggaggagctgatgcccgccgccgagaagatggccgagaccatcgccaagaacgcccccatcgccgtccgcgcctgcaagaaggccatcaacgacggtatgcaggtggatatcgaccgggccgtggccatcgaggagggcctgttcggcagctgcttcgagactgccgaccagaaggagggcatgggcgccttcctggaaaagcgcaagcacgagccctatcagaacaagtaaccccatttggttaattaacaggctccttaccgggcctgatgattaaaatcgctacttaaataaaaatttatttaggaggaacaatcatgaaagtcgcaatctttggtgcaggtactatgggcagcggtatcgctcaggttttcgcagcgaagggccacaccgctctgatgtatgcttccagcgttcccagcgctcagcgtcataaggacaagctggccgcctctctgaacaagaaggtcgcccgcggcaagatgacccaggaagctgctgatgatatcatgagccgcgtcctggtggaggagttcgaggccgccgccgatgccgacctggtcatcgagtgcgttgctgagaatatggccaccaagaaggagctgctgggccgcctggatgccatctgcaaggaagatgccatcttcgcttccaacacttcctctctgtccatcaccgagatgggccagggcctgaagcatcagctcatcggcatgcacttcttcaaccccgtgcccgccatgaagctggtggaagtcattgccggcggcaacacccccgccgagctggttgagaagatcaagaccctgtccaccgagatcggcaagacccccgtggtggtcaacgaggctcccggctttgtggtcaacaagatcctaatcccctattgcaacgagggcgtttgcgttctgcaggagggcgttgcctctgcggaagatatcgatattgctatgcagctgggctgcaaccaccccatgggccccctgcacctgggcgatctgatcggctgggacatcgtgctgaacatcatggacgtgttgtataacgagacccacgatagcaagtatcgcgcaaacgtgctgatccggaagatggttcgtgccggcaagttgggcatcaagtccggcgagggcttcttcaactacaaaaagtaaatctgtaaaggagaaaagagtatggatttccatctgacgaaggaacagctgctcgttcgcaagatgtaccgcgaattcgcagagaacgaagtaaagcctctggccgctgagatcgacgaagaagagcgtttccccatggaaaccgtcgagaagatggcaaagctgggcatgatgggtatttatttccccaaggagtacggcggcgccggcggcgacgtcctgtcctatgccatgtgcgtggaggagctggccaaggtttgcggcaccactgccgttatcgtctctgctcatacctccctgtgcgccgcccccatttttgagaacggcaccgaggagcagaagaaaaagtatctgcctgacctgtgctccggtcgcaagatcggcgctttcggtctgaccgagcccggcgccggcaccgacgcccagggccagcagaccaccgccgtcctggatgagtccggcgagaactacatcctcaacggttccaagtgcttcatcaccaacggcaacgtggccgacaccttcgtgatcatcgccgttaccggcaagaccaccgataagcgcggccgctccatgaaggagatctccgctttcatcgtggagaaaaccgataagggtttctcccagggcaagcacgagaagaagatgggcattcgcggcagctctacctgcgacctgatcttcgaggactgcgtgatccccaaggatcgtatgctgggcaagaagggtgagggcttcaagatcgctatgaagactctggacggcggccgtatcggtatcgcttctcaggctctgggcctgggcgagggcgccgttgaggaagccatcaagtataccaaggagcgcgtccagttcggcaagcgcatctcccagttccagaacacccagttccagctggccgatatgcacacccgcatgcaggccgctcagtacgtggtgtacgctgctgccatgaagaagcagaatcacgagccctattccatggatgccgctatggccaagctgtttgctgccgaggccgcttccgatgtgacccgccgcgccgtgcagctgttcggcggctatggctacacccgtgagtatcccgtggagcgcatg

SEQ ID NO: 38 - DNA, 9377 bp, unidentified
  source 1..9377: mol_type = unassigned DNA
ttatttctgtgcaaaaaagtctttgaccacctgcaccacggctgcgcggtcggcttcggtcagaccatagtacagcggcaggcgggtcaggcggttgctttccttggtagtgtactcatccacaccggcaaagcggccgtattggatgcccgccggggcgctgtgcagcggcacataatggaaagacgatgccacaccgtgggctttcaaataagcaataaacgcggtgcgctgttccaggtctcgcagcttgacatagaacaaatgcccgttatgcacacagccttccggcacggtgggcagctccaataggcctgcttcagccagcggtgccagctcctgtgcgtaataatcccagctgtgggtacggtctgtattgatggtatcggcctgttccagctgtgcccacaggtaagcggcattcagatcactgggcaggtagctggagccataagaaacccaggtatatttatctacctggccgcgcagaaaactggcgcggttggtacccttttcccgcaggatttcggccttggtcacggtctcggggtcattgatgaccagcgcgcccccctctcccattgagaagttcttcgtctcatggaaagagtagcagccaaaatcaccgatggtgcccagtgccctgcccttatagctggccatcactccctgggcggcatcttccaccaccttcaggttatggcggcgcgcaatctgcatgatggtatccatattgcaggccacaccggcatagtgcatcacgcagatgactttggttttttcggtaatggcgggttcaatttttgcttcatcaatgttcatggtgtccgggcggatatccacaaacaccagcttggccccagctaaaacaaaggccgttgccgtggaagaaaatgtgtagctgggcaggatcacctcgtcgccgggctggatgccgcacagcagggcagccatttccagcgcggtggtaccgctggtggtcagcagcaccttgcccgcatggaaccgctgttccatccattcatcacagcggcgggtaaaagggccatcgccgcagattttattgtttgccatggcctggcgcatatagtccagctctgtaccaacctgcgggggaatattaaaaggaatcattgttttactgtcaactcgcaatctattgtaaccatccggccgttatcactgggcgcggacaacatcactttccggcgtttcgggttcaaaattcagccgcttttcttccaccaccagggggcggtccataatacgggcgttcattgccatgatgtactcgcccaaaaatcccagaaaggtcagctgcacaccacccacaaagaacacggcaataatcatcggggcataacccgcagcaaaggtattccagtggatcagctttgccaccaggaacacaagccccaggataaagctgaccgccgcgcagaaaaagccgaagaactccgccatccgcatcccaatcttggtgtagctggtaaagctgagcatggcggcatcaaacaggctgtaccagttgttgtgggtcttgcctgcccggcgcttgggctgggtgtattcaatctccttgcgctcggggccaagctccgccacaatcccgcgcaaaaacggggtggggtcgtgcaaatcacgcagggtttggataaagcttttatcgtacaggccaaacccggtaaactgctcgatcatttccacattgctcatctttttgatggttttgtagtaacagtcccgcaaaaagtacatgacagggttttcctggctggtggtctttttgccgattacaattttgtagcctttttcccattcagccacaaactttggaatcatctccaccgggtcctggaagtccgcgcagatggtaatggtgcagtcccctgtggtatggatcataccgtaataggggctgttgaactgaccaaagttcttgctgttaaaaatggctttgaccttggggtcctgcgcgcagatgtccgtaatgatccggcgggtacgatcctggcttttattatcaataaaaaggatctcatagtcataatccgggcagtccttccgaatctcatcccgcaccgcctcatagatggggcgggcgttctcctcctcgttataggtagggatcataacagagatgacttttttcttctcgctcatgcaggtttcattcctttaagtttagtctttggcccactgccgcaatagccgggcagacccttatcactatacactattttgcaaaataggtaaagaacaatttattttcgcagttttgcgtttcaaagttcaggcttacagggcggtccgccagggtgtagggctcctcgttttccaggcagaaagtcccctctttggcaacgtggcagatgccgcggtaaatttccatagccggggtgcaggcaccgatcagcagcgttgccgccagcagaatggtcacggcatgctgtgcaagcgtaccgtcccgccatttggtgcccaccaaggcgataaagtaccgggcacagagggtcatcaggataaagatagccgggatggacacccgcatgcagaaatcgcacccctgtcccaccttaaagaacggaatgatgaagagcgacacggcgcaggtataaaacagccagctgcggcggttctgccgccagagcagcagcagatagatgccggcatccagcaggtaaaataccagcatgcctttttgcaggctggtcagaacgttttggccaaaagtctgctgcgctgcctggttcccggcgacagtttcgcccagaacgctgtagccaaaggcgttattggccaaaaaataactggccgtaatgctgagcaccacaaccagcaccagcacattggccggggagaacgccgattgcagcacgcctttttgacgctgtgccagcagaacaatgccgcgcaccaccataaaaataaccagccccacaaatgggaaggggccgcacatcaggcaggccgtgcccagcagcaggtagttgcggcagtctttctcctgcaaaaagcagacggttgccagccatgcccccactgtctggttgaacacccagaacaggcaggtcgtcagggagctgaactggaaatcattcgtccaccattccaggtgcatagcgtcataggccagcaggtccggcagtcggctgctgtacagtgcgcccagaatatccatgccgctgaagaaaatcaaaaacagcaggccgatcccctgctttttgccggtatcggcacgcaggtagaccaagaaattcagcgccgccaaataggtgcccagcgccgtccacccccaaagggccatacgggcgaacatccaggcggcatccagcccaaacagggcgtataccggtttggtcagcgccgccgggaccagccagtgcccgatgtaatacaccagcgccgtatccttttgcgggtaatacaccggccagctgtttgtgatcagatcccggtaaatggcgttgcggtaaccccagtccgagttctggtaaaaaaagcccgtctgaccgcccaggtagccccacaacagcatcagggcaaacagcagcaccagctttggcaccgaaagcgtaatgccctgctcttcttgccccacttgattaacctgcggcgttttgcacacggcataccaccaggcaaaggccagcacggccaggcccgcaacggcaaacggcgcgcggagataccccgcaaaaaacaccgccagcggcgcggtgagataggataaggcaaacggctttaacttttggtaggtcaactgcataaatactgtctggctcctgttcgtccatgcgggtcctgcccgcacggacggagttattccttaggcaacaccgcacaattcccgccttgcggcttaagcaccgctccggcagctgcggcacggcatctgccgcacctcgctcgccgtatcggcacttagaattatgcggtattgcccttattggcttaattggtttgcttttgcgtttttgcccacgcaatggtggcgcggatgccatcggcaaaggcggtgcgcggcgcaaagccggtatccgccgcaagctgggtgatatccgcctgcaaaaacatgacctgctgcggcccgtaagggattttgcccaggccaagcggcagggccaggtcgatggcatcacgcagggtctcaatatattcccgcagggggcgggcggtgccgctgcccaccgggtacacggcaccgctgcggccatggcaggccatgcggtacagtgcatccgcagcatcggcggagtaaagataatcccacttctgctcccctgccgtcaggtccgggcactgcccggccagcagtttttggatggtggcggagatcatcgtgttggggccgtcatgcgggccgtaaaccgaaaggatacgcgcccacacatggtccatgcccagagcggcggcctcggtacggctcatctggcctgcacacagcttggccatgccgtacccgttttcggggtttgtgggggtatcggcccgcagaacaccgtccacacggccatactctgcctggctgccggtaccaacaaacacacggcagcccattgccgccgcggtgcgcacggcatcaatggtatagcggatattctcaatctgagccggcatatcattgcggcccgcgccaatggtgtgcgcccacgccaggtggaaaaaggcatccgcctgcacgggcagcccggctgcggccatgcactgcggcaaatccgccaggttggcggcatcgcaggcaactacatacaggtttgcatccttgggcagcgctacggcccgcgggctgccggggcggcagaccgccaccacggtacacccggcctgcagcagccggctgcacaatgctgtacccacggccccggtggggccggttacgattacggttttaatgttacgttctatcatcattcactgctccggcaccaaggggataaacatctgcttttccagctcttcccgcggcaggaacggtgccaggtcctccagcggcgggctgaccagtgtgccgtccggcaggcgcttggtggcgctcttcggctcccagacctgctgggtatcggtaaagatctcgcagaaagtcgggccttctgcggcaagggcggcatccaccacctgtttcatctcagcgttggaatgtgcgcaggaatacgggtagccgaacgcttcggcaattttgcggaactccgggaaggacagatccccgctctccggcccaatgccgatcttgcaatggtctttgaacaggttgttctgggtcaggcggatggagtggtagccgttattgttgatgaggaaaatcttgatcggcagcttatttgtcaggatggtctgcaattcctgcaggttcatcatgatagagccatcgccttccaggcagatggtggtacggcggccgcctgcaatgcaagtgccaatggcggcgggcaggccgtaacccatgctggcaatggcgctgttgttggccatgcggctgcctttttggatgacatacgcctgattgcccaccacgcagcaggcgccgttggaaactgcggtcaggctgttttccggcaggcgggaactgaggtagcgcacaaaggcgtacacattggcggtggtgccgttttcttcccactggcgcggcagcacggcggggtaatcttttttccatcgctggcaggttgccagccagtccgctgcctggctgacaggggtcagcggcgttgcggcggcatccagcttttgcagaaagtccttggcatccgcccacacggggtgctccacatgcagggtgtgctttttcatctcggcgcggtcaatatccaccatgatgacttccgccgcgcgggcccaggttttccagttatagcccacctggcggatggaaatgcgggtgcccacagccagaatcaggtctgcgttctggatggcccagttgccagggcggtcgcccatattgccggcacgaccgcagtaaagcgggttttcgtcctcgatcaggtccacggcgttccagtaggtcacaatggggatgttcagcttttccgccacggcgcggaacgctgcgtacccgccggaaagccggatgccgtatccggcgtggaacaccgggcgcttggcgtggcggatcttttccagcaccatctgcacggtggcatcgtccaccgggggcggcagccgggcatcgtcctgcgccgggtcatagccgggcaggctgtcggtttcaatgtagccgccctgatagttgaccgggatatcgatccacaccgggccggggcggccggtggttgccagatgccaggctttttccagcacataacggatctggttcgggtcttccagcatggtggcgtatttggtcatgggggcaacagatttggtgatatcgtattcctggtcgcccaccgcgcgcaggggcaggccatcggtaaactgcgcggcatagcgggccgtggtatcgtaccgaacctggccggagattacaaacatagggatagaatccagccagccgcccaccacaccggtcagggcgttggtgccgccggggccggtggtaacgcacagggcggcaattttgttatcaatgcgggcgtatgcttccgccgcaatggcacttgcctgctcgtgatggttataggtaacatgcagcgccgggtggtggcccagtgcatcattcagatgcatggcgccgccgcccaccacgctgaacacatccgtaacgccgtgcgccgcaagaaaatcggccacataatcggccagacgctgtttcattgagagtgtcctccttttatttaatccgttcaagctgcggctgaaccattacaaaatacaaagttctggaatcctgcggggcatcgacccgcttgccgctgtagctaatatcgattgtactttcaccaaaaggaatatccacggtatagcggattttcatgttttcctggctgaccacaaaggtctggctactgtcaccgaaggtaatggtaatgctggggcggtcagaaatatcaaagaaataatcccccactgtaaaggtaaatgtgtacctttccgtattcagctgcgggtttaccagtttgatctccgcacttttcttgcaccagtaaaacggcagctctttgttggagttttcaggagtataatattctgtgttataaatgccatcccccagctgcatggtaatagacggcacattatacagcacccacacgccatagaaaacggcaagggaaactgccaatgcccccagtgaagcgccgaaagtaaccagcgtgctgcgcgcagcttttttatctagttttgattgttcaggctttttggttttcagcgctgccaacacacaatttactgcctgtacaacgccccagatgatagctgtcagtattgccaactgtacaatggtgttgcgaatataagagttacgctcttcaaagattggaagcggcagattaaataccatcaaaaccgcaaaaggcaatatattttgacgtgtcatcaccttttcctgtgcaagaaaatacgccagcggaatcagcgccatgcagtaaatatagttgccctggctttggtacatcatagccacggtaatcagcagcaacgcctgccattcctggcggcagagcagagcacacacaaccagtaccgccgccacagcaaaggctgctgcaaaaaaagataccgttgcattgctggttccggcaatcaggtccaccagatgcgccccatgtgcgaacatgctgttgatgccattgcctgcccaaggtgttttacttttacttccaaaagagaacaaaatcttcagccaaagctgcaagccgtacacgccctcctggaaggcaaacaccgggagcaccaacgctgcaatgccataaaacaccgtgcggattgctgctttgaaatcccggtttcttaaaagcataacacctaagaatgcgggataaattttaagtccggctgctactgccagtgcaaccaatgccagttcccgcacccatgcgcgctttgaacggtgatacatgacgaaaaaaagcgaaagtcccgccgccagcaaaataatattgccgcggtctaccgcattaagcacaccaaagctgaacaaggcaaaaaacgtactggccctggcccactgggcattttgcatcacgtcacggagcaaaaccgccagcaaaagaaccgccagcaccacaaaaaagacgtatagcaaaaagcacgactgtgttgtgcgtaaatcagtttctgtgccgcgcatggcaactgacgcctcaaagtcataggtccagttatcagataccgaagcaggcaccagtaaaaacagggcataaaagaacaaatttgccaagggcggatacagtgtgtcaaacaccgcatacggctggcgtccacgaacatattcaatgctatggaaaaaatccatgccggcatccagtgtatcatggtataaaaagtacgaaagaaaatcaccatgggtaacatacagcgttaccataaccacaatggcacacactgcgctgagtacacagtacagcttggccgtttttttccagaacggattgctccctctttcttttttaccaaaaaggccttttccccgtttcgtgttattctctttcagcacgcgctggctgttgcattcattctggccataattcagtcccagctgcaccgatttgttatcttccggcaacagctgatctaatccaatgctgataccagatttattctcgttatttgttgtcatgttgtccatacacagccttgccctatttctgttcccggttatgtatcagatattccctggtttcccatattttttaccgatatattttgcagtcttattttcaacaataaagcaccgccaaccaacctcgttgagtcggatgatggttagggatcccgataccgcacttttccgtgccggataagctccacatcgttgacgggaaacattttgtcgtttatctttccttaaatgtccacaacttgttgatgataaaattcagcggaatcgtgaccagcaaatttacaatcggcgcaatcgttttgctgacgctgaagaacgcaacctctatccaaagcaaaacattagaaaggatcgacgtgccgccgtagctgacatatgtttttccaaggcgtttcagtttactgcgccaatcgtttgcattcccggtaaacacaaacttatcgttccaaaaaaaggcattggcaatgctcagaattgttcccagaacgctgcctaccatatacaggtctgggctgatccacaaaaagatataatacaccgccatcgataccgccgtgttgcttacgccaacaaggccaaacttgataaactgtgcaagcagcgcaacaaattcctttttgctttttgctcccaacagtgccaacaatttctgcat

SEQ ID NO: 39 - DNA, 26013 bp, unidentified
  source 1..26013: mol_type = unassigned DNA
tcatctgtttttcatcgctttgtacatcaaaattcctgcggcaaccgacgcattaagggaatttatctgacctttcatgggcaatgacgctattacatcgcacttttcacggacaagtctggaaatgcccttaccttcgttgccgataacaattgcacacgcacccgaaaaatcacactcgtcataatccgtgccgtccatatctgcgccgtaaacccacacgcctttttctttgagttcatcaagtgtaaccgcaatattggtcacccttgcaacacgcatatattcaattgcgcctgcagacgctttggcaaccgtgtagcttaaaccggcacttctgcgtttcggaataataattccgtgaactccggcacattctgcggttctgattattgcaccgagattatgcggatcttcaacctcatcaagcacaacaacaaacggagcttcgcccctgctttcggcatattcgaggatatcgtcaaccgttgaataatcctttgccgctgcaaatgctacaataccctgatgagttgcaccaccgctcacataatcaagctttgtgcggtcaacttccttaacgggaattttcttgtcacgggcttttgcgaggattcccacaatcgcaccgctcttttcaccctttgcaacaagaattttgtcaatcgggcggttactgcgaacagcctcgcttacaggatttcgccctgcaatcacatcaggcttttgttctgtattttcaaatctttcgtttttcatcataatcagccttattcggtttcctttttattttttgtgtctgcatgggacacaccacttcattttgctatctattataacataacaattcaaattattaaatacttttaagccatttgtttttaaaaactcaaactctgtacaatgtatcaagagcaatcgctccggagtcgatgtattcgggaattatgccgtacattcccgtttgtatgtcctcaaaaagtatcatgtgcggagggaacactgtaaaactgcagtacacggcaatcaaaagcaacatcataaacacgcagggcaaaaaaagctgttcaatttttctttcaccgtattcaagccttgcgctgagtgcaaacgcagaaaaacacacagcaattgcacaaatgaaccttgacagacctgcactttcaacaccgagtgcatagattagcagatatgtcgcaagacagaatattccgacaaaccacagcgaaattattcttgacacggcaaagcgatggaagcccgagcgttttccgattgcctcaacaagactccacacaaggtaggaaagcataacaaccttagtctgctcccacatactgccgtttacagcaccgaaaaatatgccgagcaacgcaccgtttgtcagcgaataaagatttttgaacacaattatcatcagcggaacaatgacaagcccccaaagcctcattttcacggtttcctttttcataaaacacacctcgccgatgtattttatgagtatagattgtcatatattaccttgccacaatttgaatcgcagaaaaaaatgtttttttgaatcacaaatttgcgatttatttttctaaatttgcacttatacattctgtataactcaacattttaaacatcaatgtggaaaactatgttgaaagtgttgaaagtgatgttaaaaaatcccgatactacacgaaatttacaaagttgtaacttttaacattaaaaaaataggttttccacatttttggatacaggattgtaacggggaaattagattacattctgtataatccacatgtcaagtggtattttttgctttttttcaacatttttaatttacagaaaatgttttataaaatcaaaaaaacaggcacaccgccgtgtacctgtaaatttcgtgttaaattgtcggcttttagtttctgagaagatgaatcgccgtttcagctttctcaataatcctcaaatcattatcataggagcacatttttcgtgcctgttgcaaatcaacccaaatataactgtcaatttcctcctcctgaattttgacattatccgtaaatgcctgtgcaaggaaaaagacaacccgtttgcgaattttaccgaaaggacagtattcgctgatttcacgaaagcccttttcaatcacgacatcaagacctgtttcctctttaatttcacggattgctgtctgatgttcgttttcaccgtcttcaatatgtcccttcggaaagctccaatatctgccgttgctgttctttacaagcagaattttcgtgttctgtctgcttttgtagaagataaccgcaccgcacgacttttcgtaaaggcacacaatgcttttcagcttaatatttttcagttttgaaagcacctgtcgcagttcgggctcataaaacacctcaccgtattgtgagattatcggacgctcgccgtcaaggccgtcaaattcggcaacggcaaccacaacgccctcaaaatattctgttacgggtttgtgcgaaatcacatacgcacttttacagcgtcctgaaacggaggtaatttgtgccgaatacagcttatcgcctatttttccgaacacgctcaccttcacgctgtctgctatcatcggcatacacctccttacaagaatttacccgatatgatatcagttaaaaagtccgctcatactgtcaagctgaacctgagtgttggcactcattacaccgttcataaaaagcacctcgtcaattccgttggttttgcagtaatcaacaagattatgtttgaaatatctgaaatcgataacatgaacttcttcgtagttattggtgagatacggaacaaaagcgttgccgtaactttcctttacaacggcaatcttcttgcctgccgccgcatttttcgaagctgatttcagaaccgtgagggcattatcacccataataaacacaccgtaggtgtttgaaccgccctctgcggcttcatagtagggactgttatagcttgcggaagaaccgtctgcctgtgtgatatccattgttacattataagggaacttccaataacttaccgtatcgctgtcaagaccgtctgccgagttggtaaacgagcctgtaaagccgtcaatcttctgttccttgcaatcatcaagcgaaagaacggacaaatcgtttgtatcggcaaatgctgtgtaagcatagtaagcgccgaggcctgtccaatggtggtcgctcttaaagtagatgtaatctgtattatgttccgcaagacggttgtagcagttaatcggagttaccttgtcggaaagagccgcataagccgccttgatgttgtcagcctgtgaggttgacggagcgtcgctgtctttgagcctttgcggaagtcccatttcggtatggttaggaacaatcatatcataaacctttacggaactgccgaacttgtctgcaaagccgttaattgtctgagcatagttctgcgctcttgcatcatcactgctgaacaattcatagcctattttgttccacacataaatgccgtacgaaagagttccgtttgtattgtcgtcctttatgctcggtgtcataaagtatgtaggagaaagctcgtctgctttgttagctgtcgaagattttgcggtttcgtcgggagatgccgttgtacccactgttcccgtgggaacgcttgcaagggcatcttcctttgaacaacccttaaaaattgaagttataataaaaataataacaaacagaattaccaatgcgctcacaacgataacaattctgtttctggttcttcttttgtttcttctttttacaggtcttctgactggacgctgtgatgacggtcttgcggcatagcttgcagaacggcgctgttgctgtctgcgacgatattcacgggaatcaatgctgtcatcgaaattatcaagatcgaaataatcgtaatcgtttcttctgctcatagtgttactctcccaaactgaagatttttaaattcaatttgaattcaatgaattatataagtgtattaattactcgcagtgtactcctgtttgaatcaaagcaagccttgctctgaccgtaaggacattatcacttagattatacaacagaaactcatcaaaaacaatacaaaaagcacaaaaaatacaatttccgtgaattaacatttacaaatgcaaaataataaattacacattttttgaataaaatcgcagtaaaaacagtcaaatttcttgaacatatatgcaattcgtgatagaattacagggtatggaattttaaaaaatccttatcatcttaaaaggagatatttttatggaatacaggttttccgacagggtttcaagcctgaagccgagtgctatcagagaaatctttaaatatgccgccgatccgagcgttgtatcgctttcggcaggaaacccgtcgcccgatgcatttccctcaaaggagattgcggaaatctcggcaaaggtttttgcagaagatccgatttcggttttacagtacagtgtttcggagggttacactccgctgagaaagcaccttacggaatatatgaaaaaggagcataacacaggctccgacgatgacgacattctcatcacaacaggcgcacagcagattatggatttatgctcaaaggctcttgtaaacgagggcgatgttgtaatctgcgaggcaccgtcattcatcggctcgcttaacacattcagaagctacaacgcaaagcttgcaggtgttcccgttgagcctgacggtatgagcacagaaaagcttgaagaggctttaaaagccaatccgaatgcaaagctcatttacacaattccgaattttcaaaatccttcgggtgttacaatgagccttgaaaagcgtaagaaagtttatgagcttgccaaaaaatacggtgttctcatcattgaggacaacccgtacggcgacctgcgttacagcggtgaatatgttccgaacataaaaagctttgatacggacggaattgtaatctatgccggttcattctcaaaggtaatttcaccgggtatgcgtgttgcttacacaattgcaccaaagccgatttttcaaaagcttgttgtgtgcaaacagggcaacgatgtacatacaaatatctgggcacaatatgtatgcgatgaattcatcacaaagtatgacttcaacgctcatcttgcaaagcttcgtgaaatctacacaaagaaagcgaacttctgcatggagcttcttgacaaatactgcgcaccgaaaatcacatatcataaaattgacggcggtcttttcatctggtgtgatttgcccgaggatattgatatgccgaatttctgcaaagaactcgttctcaaaaaggtttgcgtagttccgggcaacgcatttttaactgacgaaaacgaaacctgtcacagtttcagaataaacttttcaacaccgactgacgaacagcttgaaagaggaatcaaaatcctcggcgagtatgcaaacagtctttaatcacggaggggaataatggaaaatcagacaaaaaaagaggttgtattcagcgcaatacagcccagcggaacaattacactcggaaactatctcggcgcggttcgcaactgggttacaatgcagaacgaatacgactgcatttacgctcttgcagatttgcacacaatcacggtaagacagactcctgccgttatgcgtaagaatataattgacgcttatgcttcaattatggcttgcggtattgatgttgaaaaaagtcttttcttcattcagagtcatgttcacactcacgcagagcttgcatgggcgctcagctgttacacacagttcggcgagctttcaagaatgacgcagttcaaggacaagtctgcaaagcacgccgacaacatcaacgcaggtcttttcacatatcccgtactcatggctgccgacattcttctctatcaggctgacaaagtacctgtcggtgcagaccagaaacagcacattgaaattacaagaaacattgcagagcgttttaacggtatttacggcaatgtgtttaagattccggacggtttcattccaaagaacggtgcaagggttatgagtcttcaggacccgacaagaaagatgagcaagtccgatgaaaatgtcaacggctgtgtacatcttcttgatgcacccgaggttataatgaagaagttcaagagagccgttacggacagcgaggcaaaggttcgctatgcggagggcaaagacggcgtaaataaccttatggcaatttacagcgcagttacaggtctttcatacgagcagattgaaaaggattttgacggcaagggctacggcgacttcaagacagctgtaggcgaggcagttgttgaagaacttcgtccgattcgtgaacgctacgaaaagcttgttgcagacaaggcatatcttgaaagctgttacagaaaagccgatgaaattgcccttaaaatcagcagccgcacaatgggcaaggttatgaagaaaatcgggtttatctaattaaaaaggaactctgccatgacaaaaatcgaaagtaaagcgattaactttataaagaaaaacattcttctgtttttactcggggcagtgagtataattgcgattgtcataagagcctgcggaatagattttcaaagcgatgatttcaacagctttttaaattcgtggtggagcataatcaagctgaatgattttacggggcttgcaactcaggtgggtaactacaacattccgtatcaagtcataatctatcttatgactcttttgccgctaaatgctctgtatgcgtacaaaatcgtatcaataatctttgactttgtacttgcaatttcaaccgcaatgcttgtttattcgtttgcaaagaataaccgacggctcaaagcgatactcacctactcagccgtacttctttcggcaacggtgatttttaactcatcgttttgggcgcaatgcgattcaatttacacctcgtttataatccttgcaatactgtttttgcacaaagacaagccgattgcatcgtttgtgttcatcggcgttgcgtttgcattcaagttgcagaccgtattcatcattcccgttctgctttattactggatttcgacaaagaaaatttcgattctgcatttctttataattcctgcggttgatgtgataatgtgcctgcctgcaattattatgggtagaccgtttatcgatatcatcacaatatatgcggaacagaccgactacggaaagcttattcagatgaactgtccgaacttttatgcactcatatgtgacggaaacgatataacatattattatctgttcaagcagttttcggtctttctgacaattgccgtactcggaattatgatgtgcattatcatctataaaaaggttgatttgaaaaaccttgaaacttttcttctgacaacagcgtggactgtgttcacctgtatcatgttcctttcgtcaatgcacgaacgctacggttatctgcttgacattattttaattgtctatgcggcggtaagtgcaaagcatttgtggattccgattgtgtcaacgcttataagcctgagaggctattgctactatctgttctcctacgagcttgtaagcctcaaggtgaccgcaatcatctgcaccgcactttatgtttatataacattcttgctcgtaaaaacaattttcagagcaaaatcatctgataatatttttgcaaaaacaatttaaaattaaacatattttaaataacaaacaaccgccaaaatccattatatcgggttttggcggttgttatttttatttattcaatgatttttaatttttgcaaatacaacagcaacaagaaatgtaacaaattctgtaattgggaacgcaagccatatgcctgtcatttgaacagcgctgtttaaaagccaaattacggggactaacagcacgccctgtcgcaacagttgaactacaacgccgggcataatactgtctgttgcctgttcataggttgcaatcattgcagaaaagccgctgaacacaaatccgagtgacataattctcattgccggcactccaaaagcacacatttcttccgacgccgaaaacaaaaacaatatctctttcgggaaaatcagcaccaagagcataccgacaatcatcataacagtcgctataattgttccgctcttatttgcttgtttaaggcgaccgtactcttttgctctgtaattaaaccgcattataggcaaacagccctgaatcagtccgttcaccgtcataaaaatcaactgctgaaccttgaaatatgctccgaaaaatgcaaccgccgtgtccgaatatcgcaccaaaaacatatttgcaaaattcacggtgaatgctcccaacgcattcataacaaacgagggcaatccgtaggaaaatatcagctttatcatctgcggttcaaggcagtttttaaacaccggcttaaccttttgttttgtaagaaacagctgtatcaacgcaatgattgttgaaacaacatagcctaaaaccgtggcaactgcagctccgaccacacccattttcggaaacggacctatgccgaaaatgagcaaagggtcaaacacaaaattgaatacaacacctgcaatttgaaaccacatcggagcaatcatattgcctgttgcctgaagtattttttgaattacaatatgcaccatatttggtatctgcataaaaacgcagacgctcatatacgcaattccgtattcaaaaatctctttgttttgcgtaaaagccgaataatagggatttattatgaaaagcgaaaggaaatttatcagcactccgacaactaccgaaattaccactccgagagccgctgcagaatttgccttttgctgatttttctgtcccaaataacctgcaatcaaaacattaacacccacacctatccacacggacaacgcattcataagcgttgtaatcgggaatgcaagcgatactgccgcaagtgcctgttcatttatccccgcaacaaacatactgtcaacaaggttgtatgaatactgaaaaaacattgaaatcagcggcggtgccgacatttgaattataagtttgttgacaggttcataagccattttattttccgttttaacgcccatattaacaccccttgcgtaaaataaaaatcgccatacacccataatgagtgtatggcgaaaataagaatcacatcttagaaaaatccataccaatttatatttatcatatcaatgagttaagtatatcatacctgtaaaaaatattcaagattatcaccaaaaatttactttttgctttcaagccacatatcaagggctttttcgtagacatcaatgcttgtgattccgagattcataatgaatgtgtgatattcctttgcgtcaaagcttgagccaagctcgctttcggctgtttcacgcatatcaatcatcttgaggtagcctacggtataggggagaaaataacccggatttgaacgggcaaggtcatacgcctcttttgttgcggcagtaacgctctcatcgtcagccgaaccgagtgccgttgacatatactccttgactttttcataatcccagccgttgtagttcacaccgacatcgaccatggagtagagaatatagccgagaatatcatttgcgtagataagcttcttaatgccctcgcttgtatcaaggtaatcaagcgtacatttcgaggcatactgcgcccaaccctcggttgcgccgataaagcttaaaatcttgcggacattcgggatatccttgtttgcatttgatgcggtaaactgataaagatgaccgggatagccttcatgggcaagagttgtgtacatctgagtcatacccttatttgcaaagtcggggttgattttgatgatattaacgcttgtatcgtcaattcgtccctgaacatagtacgctcccacattgtcgctctttgcggaatcgctcatataatctgccgtgtaagaggttgtaacgggagtcggaaagtcctcctcgatattctcaatcaaaaattcaagcacctcatcggcgtccttaaagtcgggtttgtagtcctgaaatttgctcaagtcatcctgcgaaacattgctcatgctcattccaacctttgtaaagctgtttgtaaggtatgatttaagctcctcgggagtcatactgctacttgttttgtctttgacgattgccgaataatactttttgccgattttgccgtaaccgcaaagaccttcttcgtttttgcctgattttttgagacttttaagtgctgaatttgctgatttcaaagcaggaatgtagtattcttcaaaatactttttattggtttcgacaacagtctttttctcggaatcgctaagaccgagtgactttattctcgattcaaactcgtcaacaagcacggacttgtcattcttaatatgcttttcgcactcgtcaattgactgctgtgcaatatcttcagccataaagtaaccgtcctcagcctgtttccttgtgaactcaatgcactcgtccatatagcgttttgtgtccttcaaaacagcaaggtaaaggtcggtatcatccttttcatagaaagtgaattcggacagggtggtaaagaggtttgcaataattcccgactgcggtgcaaatatactctgcaattctgttgtaccctcatatgaaagctgaatttcaaagtagctttcaagggtgtcatatgtctgcttttgagaagaagtaagtcccgaacggtcaaactcctccaaatccgtttttgcctttttcagttcatcaaaggattcttttgtatcttcatcggacacatgaccgagggtatagtcctcctcgtcatatttcagaccgtagtccgacggatttgaaatatcaaaatgtgcggtaagagcgtcatcctcaagttcttccgaaaacaaatcgtcacaatatttatcaaactgaatttgtgcatccgttttggttggttctgtgttagagtcaaagtcacaggcacagacagaaaatgccataacggcacataacataacagcaagcgcacccttgagtgactttttatttataattttcttcattttgtcctccgtaaagattgttgtttaccaaagtataacatattatcgtgctgttattcaataattatttttcattttacccttttccgcagtaaccgtagcaacgctcaacaggcattgccgttctttttcaacaattgttgaaaaccatgtggaaaatgtgtataataatcagccctgctcaattgtatttttgtaaattgtaaccatttgtaattatttgtaattttctcggataattgagccaacaatatgccggaaccgtaaactcgtaggggtagccttgcgactgccgcctgtggcggataatatccgcctctatagatttgtacaaacggttgcaatgttacgcccgggcataatatgttttttacattacaaactgtctgcccgacattaattttcaattttccattttcaatttgaaattcgttctatcgcttcgcttaaatccgtacacaaaaaatctatcatcggtttaatttcgtctgtcggctctgacaaatcgggaaccataaccgtggtcatacctgcggcatgtgcagattttatgccgttaatgctgtcctcaaacgcaacgcagtccaccggctcaagcccgagcttctttgcggcaatcaaaaaaacttcgggattgggcttgccgttttttacatcatcaccgcacacgaatgcgtcaaatttatcatagagattgattttcttcataatcttcaaagccgtttgtgacgaggttgaagttgcaagcgaaattttacaaccgactgattttaaataatcaaaaatttcgtacaagcccttttttacaggcacaccgttcttttcgatacgcttaaaatagcggattctcgactccgccttgtaagcaggatagtcaaaatcatcgccgtaaaccgacttgtaatattcgtaggaatcctcactgcgaagtccgattgtctttttgaaaatgtcaagattaaactctttgccgtcctcatcaagcatttcctgccagattgaataaacaagcctttcgctgtcaatcataagcccgtccatatcaaaaactgcgcccttaaacataaaaccgccccttttttcgcttttaagtctgtatataatagcatattttacaaaaaaagacaaatcggttgtaattgcgacaaagttatgatacaatcgtttaaatggtctgtgaaaaatataaatttgagggtaaggaaattttatggcaacatcaatttatgcaaaacctatcaaagcaaaaacgattctgaagttcactttgccaaccgttcttatgatggtttttatgtcactttacacggttgttgacggaatcgttgttgcgaactgtgtcggaagtgacgcattgtccgcaatcaatattgtatatccgttcacgctcgtatttatggctgtgggcttaatgttttcaacaggctcaaatgctataatcgcaaagaaaatgggagaaggcaaacaggaggaagcaaaccgacttatgtccggtgttgcaatcacggcaacggtcatttctgttatcattgctgtgctgttcacaatttttgccgaacctatgtacatgatgttcggctcaaacgaaaaaattctcccctactgcattgactacggcagcgttatgattccgtatggctttgtaatgtgctggcagatgctcaaccaatcgtaccttgtaacagcagacaagccacatatcatgcttgttttctcgatactgtcgggttgcacaaacattgtgcttgacattctttttatggctgtgtgggattttggaataatcggtgcaggactcggcacaatcatcggaatggctgtgggtgcaattccgcttttgctctttttcaacaaaaagcagactctgcactttggcaagcctgaattcaaggtaagtgaaatcctctttgctatggcaaacggctcgtcagaggctgtgacaaatctttcaacagccgtgacaacagcgctgttcaacattcagatgatgcactttgcaggcgcaaaaggcgttgcggctataagtgctattttgtacattcactttattttcactgcggtttcgtttggattcacttcgggagtttcacccgtcatcagctttaactacggcgcacaaaatcacgaaaaactgcaaaagctgttcaaattatgcataaaaatcacgctgataatttcggttgcaatgattacggcatctgaattttttgcagaaccgcttgtcggaattttctcggcaggcaacgaaaaaattcagcagattgcactcagcggattcagaatttttgcaataaattatctgttgtgcggaatgaatattttcgcatcgggacttttcaccgcactcaacaacggcaagatttcagccgtaatttcagttgcaagaacgcttgttttcgagtgtgccgcaatgctgattttgccgatgtttataggcataaacggtgtatggtcggcattgcccgttgcagaattgtgtgccgttgcaatttccgtaacatttataattgccaatgcaaaaaaatatcatttggtaaaagtttaatatatagcgatacgtagcggcgatcagtgatcgccatttgatttggctgcaaagccaaatcaaccatacaccaatattttgaaatacggtcgaaccgattttgcaatcgtttcgattggcgttcactgaacgccgctacatatttggattcacaccaaacaaaaagtccgaacattttgcgtgttcggacttttttcatagattaaattttcaacgattaaattttaattaaaatcagattgcacgaactctgattacgccgtcaactgctgcgatttttgcaaggtcatctgcaccggcgcctgcaacatcaataattgtgtaagcatagtcgccacggctctttgaaagcatattttcaacattgccgctgatctgtgtgagaaccttcttgagaagctcgggaacattcttgtgagcaacgcagaaacgggtatcgtcagcatttgttcttgcaagtgaaattgcaggatagtttacggagttgatgatgttaccgttctcgagatactccttaacctgatcacaagccataacagcacaattttcttcactttcgggagttgatgcaccgaggtgtgggaggcagataatattctcttcaccgaggatatcgtctgttccgaagtctgtaacatacttagcaaccttgccgctcttaacagcctcaagaactgctgttgaattaacaagaccgtcacggctgaagttgagaatacgaacaccgtctttcatcttggcaatcatattggcatcaaccatatctcttgtgtcatcagtaagcggaacatggattgtgagatagtcgcaatttaccataacatcttctgcgctcttcatgagcttaactgtaggagcaagcttgagagcgttgcctacagacataaacgggtcaaagccgattacattcataccgagagcaacagcggcatttgcaacaagaataccgattgctccaagaccgataacaccgagggtcttgcccttgatttcgggaccgacgaactgactcttgcccttttcaaccatcttaccgacagctgcaccgttgcccttgagagtctttgcccattcataaccctcaataaccttacgatttgaaataagaagtcctgcgataacaagctccttaacagcgtttgcgttagcacccggtgtattgaacacaacaataccctgctcactgcacttatccttcggaatgttgtttgtgcctgcgcctgctcttgcaattgcaagaaggttatcggcaaattccatatcgtgcattgcggcacttcttacaagaactgcgtcagggttctgaacatcgtcaccgtatttatagttatcaccgagacggcttgtgccgatagcggcgattttgtttaatgtaagaatgttatacatcaaaatcaatcctttttaattttttattttaagaatttacaataacaggcgaacagcgttcgcccgttatatcataatattcaataattacttgttttcagcctcgaacttcttcataaactcaacgagtttttcaacgccctcataaggcatagcgttgtagattgaagctctcataccgccgactgtgcgatgacccttgatattaacaagaccgttttcagtagcctctttaacgaatttagcgtcaaggtcagcgtcacctgtaacaaacggaacattcataagcgaacgatcctcgggaacaacagtacccttgaaaagctctgaagaatcgaggaaaccgtagagaaggtcagccttcttcttgttgatttcatacatcttatcaagaccgccaacctcgttcttaatccactcaagaacaagctttgcaatgtagattgtgtagcaaggcggtgtgttgaacattgaaccgttgtcagcgtgagttttccagttaagcattgtaggagtgatatccatagcgttgccgataagatcctcacgaacgataacaaccgtaagacctgccggagccatgttcttctgtgcgcctgcatagagaacgccgaactttgaaacatcaatcggtcttgaaagaatacaggaagaaatatctgcaacgagcggaacatcacctgtgtcgggaagctcgtgataaacagtaccgtaaattgtgttgttcatgcagatgtagaaatagtcagcatcctttgtgaatgttgaaggatcaagctttggaatgtatgtgaaggtcttgtcagccgatgaagcaacaacattagcctgaccgtaacgggcagcctctgcatgagcctttttagcccactgacctgtgataacataatcagccttaccgctctttgtcataaggttcatagggatagccgcaaactgtgttgacgcaccgccctgaaggaaaagaaccttgtagttgtcaggaatgttcataacctctctcaaaagagcctcggcaccctcaatgattgtaccgtaaatttttgagcggtgtgacatttccataacgctctgaccactgccttcgtagtcgagcatttctgccgctgcttttttaagcacagactcaggcagcattgaaggacctgccgaaaaattatatactcttgccatttctgatatctccctttttaaagaaaatttaaaaatatagttgtaaaaataaatacatttaaattatacgcttttagcacgctaaagtcaataaattcatagcactaaagcataaaaaacgaaaaatttcgtgattctgttgtgcaaatgaatcagccaagcttaattttgccgatgcaaccaacgatttcatctctcatacgctcagcctctttacgagcggcaacggcaaaatcatcttctgtaagcccctgctttttccatgcgcacataatgccgcggcttgagttgatgattgcaccaagaccgttttcgtcaaatgcgtttttaacatcatcggcaccgccgccctgagcaccgtaaccgggaacaaggaagaatgtgtgcggaagttttgctctcatttcaccgagctgttcgggatatgttgcacccacaactgcacctactgccgaatagccatgcttacccataaggtcttcgccccagccttcgcacatcttgcccatatgctcataaacgctctcatttgtttcaagcttcatatcctgaagttcgcccgagcttgggtttgaagtttttacaagaacaaaaatgcccttgtcgtccgaatcgcaaatttttgcaagcggcttgataccgtctgttccgaggtagccgtttaccgtgagtgcgtctgcaccgaatgcgtcaatactttcgcctgcaacatctgtatgaccgaggtgtgccgtagcatatgcctccatagttgtgccgatatcgttacgcttgccgtctgtgataacgaacataccctttgactttgcataagcgattgtgtcacaaagagccttaacaccctgccagccgtacatttcataatatgcagcctgtggctttacggcaggaacaatatcataaagtgtgtcaataagcgccttgttgaattcaaaaagtgcagcagccgcaccctcaagcgtcttgccgtacttttcaaagcattttgttttgattgattcgggaacatagtcaagcttagggtcaagacctgcaaccgtaggattctgcatttttacaatattttcgataagtctgtcaaatgccatagtgattctcctcattttttgttattctttctatggtcgggcaaacaattcatatcccgactgcaatatcttttttacaatgctgttgttcgcccctacgaattattattttttagctgttgataatatcataaagttcatttgagaacttgtaataatcctgtctgtcctcttttacaaactgaattgcaggacggggatgtgtgttgtactgacctgtgagaaggtacggaatatcgtaaccccacttaacgccctcagccttaaacttgtgggtgtactcctcaatgattttgagaataggagcaacctgatacttcgggttcttgaggaaaccgagaagaagttcaagtgcacagttgcctgcgcctctgcccatgccgtcaacggttgcgtcaaggtagctgacgccctgagtcatagcctcaattgtgttggcaaaagcaagctgctggttgttgtgagcgtgaataccgaccgacttgccgtacttgtcggcaattgagcagtaaaggtctgcaagtcttcttgactcctcgggatagagtgcgccgtagctgtcaacaatgtaaaaagcgtttacgggagttttggcgagagtttcaagagccgctgtaatatcctcggttcttgcctttgaaacagccataatattgatagttgtttcgtagcccttctttgcagcgtcctcaatcatttcaacagccgcaggaattgcgttgatgtatgttgcaattctgatgaggtcaatcgggctgtccttctttgcgataatatccttcttaaaatctgttctgccgacatcagccataacagcgattttaagaggagttttgttgtcgcctacaatttttctgatatctgcatcgttacagaatttccacttaccgaaatcttcttcgttaaagatttcctttgatgccttgtagccgaattccatataatcaacaccggctttaacatttgcattgtaaagagccttgataaatttgtcgtcaaatctgaaatcgttacaaagaccgccgtcacggattgttgcgtctactactctgatatcctgtcttaccgacaggaggtcacccttctgtgccataattttactcctttatgttaaagtttatattaaattaaatgtattttgtatggacgaacacggttcgcccatacagcaatttgtttattaaacaaactcaatcttcaaaaactaccttaccgccgaggattgtctttttgactttacctgtgagggttctgcctttaaacggggtgtttttgcttttgccgtgaagtttaccagcatcaactgtccattcttcatcgggatttataagaacaacatcggcatttgcaccgactgaaagagtgcctgcgttgattttcaaaatccttgcaggattaacactcatcttctcaacaagctgtgaaagcgtcattctgcctgtcttaaccaggtatgtgttgcagaccgcaaacgaggtttccatgccgattgaaccgttgggggcttctacaaaatcagccttttcctcgggggtgtgcggtgcgtggtcggttgctatggcatcaagtgtgccgtcacaaagcccgttgataatctcgtcaacatcagcctgagttctgagaggcggattcattctgtaatcagcgtcacctcttaaaagctccctgtccgtgagcgaaacataatgcggagcggtttcggcggtcaccttaacacctctccttttggcatcacggataagtgcaacgcttgttttggtgctgacatggcagatatgaataggctcgttaagagcggcggcaagtgcaatttctcttgcagttccgcagtcctcggcaccggcagggattcccttgacaccgagctttttcgaaacctcgccctcgttaattttaccgccgtcggcaagaaacaagtcctcgcaatgtgcgacaattgtcatgccgagctttggagcttttttcattgcgtcactcaaatactttgtgttttcaacaggtctgccgtcatcggtaagtgctattgcacctgcacttttcacagcgtcaatgtctgtgggttcttcgcttttaagccccttggtaacgcttgccgcaacataaacacggctgtcggcgtctttagctttgtcaagaatatactttacaatttcggggctgtcggttgtggggttggtgttaggcattgcaagcaggcttgtaacaccgcctgcggcagccgccttgcatcccgtgataatatcctctttgtgagtctgaccgggatcacgaagatgcacgtgcatatcaacaaatcccggaacggcacaaagaccgtctgcatcaataatctctccgtctgatgtaatgccgctgccgatttcggcaatcacaccgtcctttatgagaatatctgttttttcgttaagcttgtcggcaggggaaacaaccactgcgtttttaattagcatttccatgtttttcctccgttaagaaaagaaattatcttctcttgtttctgtttgcagggtggcgattctgctgggggcggcggtcggttctgctgtgaacctgaacaagtccgtcactttcgcctctttcggcacgcattcttgcacgctctgccttttgtctttctctctctcttctctcttcctctgcctttttgcgtttggcaattgcacgcttacgctttatcattattgaaacattcttgcagaaatatccgcagtgaatgccaaaattcttaactccgcctgcaaagcccctgagagcgttaccgatgtttttgcctacattggcaagaacctcttccgttgaccgtttatcattcggttcaccctcggtttctttattattctctttttcaagagcgttctgctttacggtttctgcttttctttcaacctcgccgataacatcaacgtcctcggcatctctgaggtctgagcttttgataacccccattgactttttgggagcttcgtcaaaaaagtcataaccgctgtcaaacttgtttttcttagcctttgcccttacaagctcctcatcatcaacctcttccccggttttctcctcgggatcgtcactgccgaaaatgatgtttgcgtacttgtcaacctttttttcaagcggatgcttttgttcggaaacctcctcggtttcttcaacatcggcatcgtcctcacggtcgatatcgtcaggctcgcttgtttcaaaaagatcgtgttcgggttcggggataacgagtgtaggacccgacgaagagcttatgtcctcgtatttttcaggtgtttctgcgttatctttttcgttttcgtcaattttttcgggttcagtctctgaggtatctgctgcggtaggctccttttttttttcgtcctccgtgctgttttcctcgtaaccgtagttgtttttatatgcctcacgctcaagctcactcttgtaagcctttgcggagttgattatctcgtcaatttctttttccttggcatcatccgtgtcataaccaaagtttgaatactcacttgtaatttcttccggttcttccatattttcgattatcggctcgggagcatatcttctgcccggcaaagccggttcttcttcaacttcttccgcatatttctgctttttctttgagcgtttatcgggcttttcgggagaatcgtcaaaattgtcgatgtcgtagtccgtacccttttcaccgagtttatacttgactgcaagctcctcaagaattgcgttattcttcttagcctttttatgctttctgattctcacggcaaaaattatgatgagtacaatcaaaataaggataacaacaccgccgccgatgattatgtacggaataaatccctttgaaaacggcaggtcgctgaattttaccgaagatacaactttggaaaaagtatcgtagtcaacggttgtaacatcaccctctgttctttgcattgtgatattaatgttcataccgtcataaaccgtgttggcaacaaaggttttcacatcgcccttactgctctgagcagttgcgtcaaacacaagccacacagctttttctttttggtcgggagtacagctccgatactcgtcggaattaagaaaattgttgcgtatatttgaaagctcgcttgaagaaagctgagcatagttgccaacattctcgctgctctcattttttgtcattgtcacggtcagaataaccgatgacatattatccataccctgaagatagatatttccgttctgaaaggttttcattgttgtgtcataatcaagaccgaaaacggaaaaatatttatctgtgcttttactgtcccttgtaacagcgctcataccgtcaggcattgaaagcgtcatatcgtcaatctgcggaatctcgtaatcttttgttgcgcccgaacaggcaaaaataccgcaaaataccgttacggcacaaattgcaagcgttacagctcttttaaaaacagttttcatcatgtccgtatattcccccgaaactaaattagattcatcaatactgctttttagaatgtatatctaattaattatacataatctgtcaaaaaaatacaaggtttttaccgcttaaatttgaaaacaagagtaccctattcgtgaatgcggtatgatattaaagaacatattacgcctgagcgtgcataaaattgaaaattgaaaatggaaaatggaaaattatggtcgggaagacaattcgcaagaatgcaaaacattgtcgcccgactgtttttgtatatttttgttatatacggaagttgttgcaaaactgtatgtacggatattatccgcctgcagataaccacgcaaagatttgtacaaattaaaattatataaataaacattcactttcatataaaacaaaaattgcatcaatgccgtatcgggcatcaatgcaatttctttatctgactatcttctcgaattgactgcggtggcacaccgccaaccgaaattttacattttcaattttcaattttcaattaaaaacaagactgccgtttattctacagtaaccgacttagcaaggttctttggcttatcgggatcaatacctctgttgattgatgtgtaataagcaagaatctggagcggaacaaccgctgtaatcggcataagaagctcgtctgtatgcggaatttcgataacataatccgcaacaccgtccttgagttctcttgcacaggcgtctgtacaaacaagaataacttttgcacctcttgacttaacctcaacaacattgctgattgtcttggggataatacctgtctgagttgcaacggcgataacgggaacatcctcgtcaataagcgaaattgtgccgtgctttaactcgcctgcggcgtagctttctgagtgaatgtacgaaacctctttgagcttgagcgaaccctccattgaaagggcatagtcaagacctctgcctatgtaaagcaagctgtcggttgcaacaagctttgtggcaacgaacttgcagatatcctcgcagttgtcaattacatactgaactgcctcaggcatttttgtaagagccgaaacaagtcgcttgcactcggctgtgctgattgtttcctttgcaagagcaagctcaaaggcaaagagatacataacggaaagctgtgtgatgtatgcctttgttgacggaacggaaatttcgggacctgcaagtgtgtagatgagcatatccgcctcacgggcaattgaactgccctttgcgtttacgattgcaagagtttttgcacccttctgctttgcaagacgcattgcggcaaggctgtcggctgtttcgcccgactgtgaaataatgattacaaggtcgccctcgcctacaatcggatttctgtaacggaactcggacgcaatgtcaacatttacgggaactcttgcgagatcctcaataacatacttgccgaccatacctgcatgcatggcagtaccgcaggcaacgattgtgatatttttgaaattcttgattgtttccgttgtgatgccgcactcctcaaggaacggaagtccctctttgattctcggcataatcgttgttctgatagcctcgggctgttcgttgatttccttaatcataaagtgcggataaccgcccttttcggcagcctccatatcccagtcggctgtctgaagctccttttcaatcggatcaaggtgttcgtcaacgaacgaaacaccgtcaggtgaaagtgttacgatttcatcatggtcaagaagataataatcccttgtgtactgaagaattgcaggaacatcggacgcaataaagcactcgccctctgcaacgcctacgataagaggactttcacggcgaaccgcaaaaactctgtcggggaaatccttgaacataattccgagtgcaaacgaacccttaagctcagccattacactgtcaattgtttcaagaggatttccgttgtatttatagtcgaggagctgagcaacaacctctgtatctgtgtcgcttaaaaaagttcttccctttgagatgaggaagtctttaagttccatatagttttcaataataccgttgtgaacgattgtaacccttgtaccgctgtgtggatgtgagtttacatccgaaggctcgccgtgggttgcccaacgggtgtgacctatgccgacatgacctttcggagtgccgacctctgcaagcttatcctttaagtcctgaagcttacccttggtctttacggtcttgatttccccgttatcaaaaaccgcaatacctgccgagtcatagcctctgtattcaagctttgtgagagcattaacaagcacctcactgcaatccttaggtcctacataacctacaataccgcacataaaatttctccttttcggttaatcattgaccttgtggcaaaaagtaggtacaagttctgccaaaagttcaactgtcttttcactgtcattgttttctgcggtttttttgagaacctcaagctttgacagcatatctgtttcgtctattttaatttgatttcctatgaaaattttcttgttctgtgttgacttaagaccttcttcgtccataagaagctcctcaaaaagcttttcacccggacgaagtcccgtgaaaataatcggaacatctttgtacggaaccttaccgtacattctgataaggttctcggcaagggttgtaatcttgacgggagcacccatatcaagaacaaaaatctcaccgccctttgccattgcacctgcctcaagaacaagcgaaacagcctcgggaatagtcataaaatatctgataatatcgggatgtgttacagtaacgggagcaccgttttcaatctcacggcgaaacagcggaataaccgagccgtttgagccgagaacattaccgaatcttgttgttacaaattcggtatcggtgctgtgctgcgccttgtactgaataatcatctcgcacgcacgctttgttgcgcccataacatttgtcggattaacagccttgtcggttgaaatcataacaaacttctttgccttgtacttttctgcaagggttgcaacattgaatgtgccgaagatgttgttctttacagcctcctcgggaacggtttccataagcggaacatgcttgtgagcggcagcgtggaatacgagttcggggcgatatgtcttgaagataagctccattttgtcgtaatcacgaaccgatgaaataagcgttacaaggttaagctttgtgccgtattcaagcacaagctcctgctgaatgtcatatgcgttgttttcgtagatatcaacaatgatgatttgtttcggatcattctttgcaatctgtcttacaagctcactgccgattgaaccgccgccgcctgtaacaagacaaatctttccgttgataaggtcatgaatctcctttcggtcaaactcaatgggttttctgccgagaagatcctcaatcttgatttcctttgcctgtgaaataagctgtgtatgcccgtcatcaaacaaaagctcaccgagataagggataatcttgattttgcactctgttgcggaacagtagtcaagaatcttcctcttctcatcttcctcacatgacggaagtgcaacaatgatattgtctatgcggtattcatcacatattttaacaatttcgggacaggttccgacaacggggattccttcgatcttctgattcagctttttcaaatcatcatcgacaaagcataccggaatgatgctttttgaaggattattaacatcaccctgctctttcgcattgtgaatttcacgaacaatcattctgccggcattgcctgcgcccacaataagggtgcgctctccgccctctgcccttcctgcctcggtaaggtcaagaaaagcccttctgaaaacaaaacggaatgcaagaattccgacaagggctattgcgaaatgtactatacaaaaaatctttctctgcggaatctgcaaaaacaacgagattacaaagccgagcgtaaaccccgaaaagacggcaattccgcacaccatatagtcctttgcgttaaagtatcgccacaattttgaatatgttccgcttatataaagcgtaaacagacacatgacaagatcaataacaatatagctcaacaagcctttgcttgaagcagcacctatgtagccgacaagcaagagaatataatttgcaagaataccgctgacaacgataataaacacatctgcgagagccagcaacatcttacgcaaattaatcttcttcat

SEQ ID NO: 40 - DNA, 13080 bp, unidentified
  source 1..13080: mol_type = unassigned DNA
ttattccaccgtaacactcttcgccagattcctgggcttatctacatccagtccctttgcgacactgacataatatcccagcagttgcagcggtatcaccgcaaggctggccatgaaatgctcgtccaccttcggcacatagacagcgaagttcacctgatcttcgatttcgtaattgccataggtagtcatgcccataaggtatgcacctcggctcttgcactccagcatattgcttatggtcttctcgtataactcgttctgcgtcaggacaccgatcaccagcgttccctgttcgatcagactgatggttccgtgcttcagttccccggccgcatatgcttcggaatgaatgtagctgatttccttcagtttgaggcttccttccagacaaacggcatagtctataccacgtcctacgaagaatacatcagacgcattggcatactttgcggcaaaccattgcaggcgctccttgtcttccagaattttctgtatcttctccggaatcgtcagcagttcggcaatataataaccatactgctcttctgtgatcttaccacgaactttggcaaactgcactgccaggcaatacattgctgcaagctgcgcactataggccttcgtggttgccaccgaaatctccgggcctgccagtgtgtaaaatactttatccgcttctctggcaatactactgcctaccacattgacaatggccatagtggtaatgcccttttcttttgcaagtcttaatgcagccaaagtatccgctgtctcaccggactggctgaccacgatcatcagtgccttcgggttcagggacattttccggtatctgaattctgatgcaagttccacacgcaccgaaatatctgccatgtcttccagaacatactgtgccgccatgcctacatgccatgcagaaccacaggctacaatataaatctgttcaaagcccttgatctcatcttcggtaattcccactgcttcgaaatctagcctgccatctttgatcacagaattcagtgtatcctgaactgctttcggctgctcatggatctctttcatcatgaaatgttcaaaaccggccttttctgccgcttctgcatcccatttgatttccgtagtctgcttctcgatttcatccccgtccaggttataaaaatgagcttctcccggagtcagctttgcgaactcaaggttgcctatataatacacatttctggtatatttcagaattgccggaacatcggatgccacataggtctccccatccgcaataccgatgatcatcgggctgtccttacgggctacccagatctcaccgggatagtcacggaacatcagctccaacgcataggatccgcgaatgcgcaccatggttttcgcaatggcatcaatgggaccgagtttatacttcttgtagtaataatccaccagcttgatcgctacctctgtatcggtctggctgtaaaatgtataaccatgcttcagcagtttttctttcagttccgtgtaattttcaatgataccattatgtacgcctaccacttccgattctaccgcaccggaaccggatctgctgcagttgccggagacatggggatgggcattgatctgactgggttcgccatgggttgcccaacgggtatgtccaataccacaggttcctttcaacgcatttccattgtccgttttctcgaccagattcgaaagacggcccttcgcctttactacctgtgccagggcatcgccatcgcggactgcaagtcccgcagagtcataccctctatattccaattttgacagtccgtccagaaggatcggtgctgcctgtctatttcctgtaaatcctacaattccacacatatgctaatacttccttatcattctaccgtgattccaccaagtacgggaatctccagtcgtttcagtaactctaattctgcaacaatctcattatacaaggtcgatcctgccttttctaccagaaccgctccctgggctgcacttactttctccatagcttcggcatcatacagcacgttattcagtattgtaacgctaaggtcttccttttccagagcagccttaagtccttcacataccttgtccgctccggcccccagattgcatcccatcagacagatactgttctgtccgttcttggcagctgctatctttatcgctgcgaatgccagctccatggactgctctgcagtaaattcgcgcttgccgtaatgtcgtaaaccgttaacccatctatccaggaacagctttttcttggaatcttttaccaccacgccaatctgaggaataccatatagatcctgcaatccatcgtttacacgaattcgactgttaaaaatataccccatacacaggaccgcagcatatataaaggcgaacaggacagctcccagcaccacatatttcttgcttaccgcaggattttccggaaccagctgctcctcttccacaatgctctgttctgcgtctgtcgtatcttccaaaccgttttccttcatcagaagcgtataatactgtttttggtcttctgaaaatgctgcttttgtagcggcaatggttgtttccaggccataaatcgaatttctgtaagctgtctgttgattcatcacatccatgttcattatgttgccagacacttcagaaagcaacaccaattcatgacttcccaaccgggtgttcaaattttcctgttgctgttctatataagtctttaccgcttctgcaattttcccgcaagactctgcatcgactcctcggattattattttcagactatcgcttcctccaatagtcaagggctccccattggtaagcgtcaaaccggaatccacgctgacagagaccagttcccctacatatgcagcttccagtccggtctgttgttctatccagtcgtacaatccgacactgtaaagggtatttctatagattgttcccaggcgctgagatcccttttcatctttttcctgaatattgtaaaccagttcctcctgtgcaacgttcataggatctaactgcatatagatagaatcctgcacatattgcttcttcaacgcacattcttttgcatcatcaacagtcgtcaataccaccgccagctgactgtcatccagactttctcttaattgtgccaactgttcttccatagccatctcaccctcagatgcatcttctgcctcctgtggctgcatattctgtgcattctgataagatctcgtatagctgaatgcccccataagaatcgctcccaaaactactgctatcagcaatcctctccaatgtgacaaaatatctgctatcatatccagtaaatcaatttcccgttctttcattttttctttgccctcctgtattccatgattcgcttctgtcattccatactaataattcattttcctacaccggttcaaaaaatgtatccggatgtcccggatcaaatatttcattacaggtcataacggttatcagattttccgtttcggacagatttataatactatgggaccatcccggtatcatatacactgcctctatccggtctcctgacacttcaaattcgatcttctctccggtgttgatattccgctcctgtatcagtccgtgtccggatactacaatgaactgttcccacttactattgtgccaatgctggcctttggtaattcccggcctactgatattaatggatacctgtccacaattcaccgtgtgaatcagttctgtaaaggagcctctcgaatcctcattcatcttcaactgatatttgaatttttccgtcggtaaataagtaagatacagggaaaacaatttctttgcaaaagaaccctccggcatttccggcatgagtaacgacaccgactgttgcttaaattcctgtagcagatccacgatctcgcctaaagtaaccttatgtgttgccggtacacagcaataccgtccatcgtctttcagtacagtatcaacaccgtcaaactcgcaacgctgctccttaccttccatgaggtcaaacataccttctatcagatcgtctatgtacagtaattccagttctgttgccctgtcgtttactgtaaattcttcatcgttcgcaacagcccaacagaaggtactgaccgcagaattatacttcggtctgctatgtcccatcagattaggaaaacgatacacggcaactttggcaccggtctctctcgcatattgaaagaaaagctcttctcccgccttctttgaacgaccatattcggaatctccaaatcttccagccaatgttgcctgaatggaagacgacagcatgattgtcgctttattctcatactttttaagcgtatccagaagcttcgatgtaaatccaaagttcccccgcataaagtcttccgggttctccgggcggtttactccagccagatggaatacaaaatcagctgacttgcaataagcatccaattccgcttctgtcgactgtatatcatattcatagatttcatcgacatgaatgttcggtctggttctgttcttattttctttgatatttttcaggttattgacgagggcagttcctaccatccccttagcacctgtaactaatatattcatcagttatctccgtactctctcttttcgttactgctcttttctccataccatcttgttcacgacatttacatagccctgtatgatccgcactaccttcatagatacattctcatccgtataatccgggcacggctttcctaaaatacccttctgtttcatatcaattgccatacccgttgcctgcagaagttcctgtgtcgtaattccagctaatataaagttcccggattccagtgcctccggtcgctctgtagaagtccgaatgcatactgctgcaataggatgtccgatcgacagataaaagctgctttcctccggcaatgtaccggaatcagatacgatcgccaatgcattcatctgaagtttattgtaatcattaaatcctaacggttcatttacccttacacggggatctaatttaaatccactggactcaagcttcttcctggatcttggatgacaggaatagagaatcggcatatcatacttttctgccaatgcattaattgcctcaaacagagatgtaaaattcttatccgtatcaatattttcttctcggtgggctgataatagaatatatttattcggctgcagtcctaatctatccagcacatctgacgcttcaattttgtcaaggtttccatgcagcacttctgccatgggggaaccggtcacatatgttctctccttgggcattcccatctcatgcagatactttcgggccggctcagaatacggcagattcacgtccgagatcacatccacaattctacgatttgtctcttccggaagacactcatccttgcatctgtttcctgcttccatgtggaaaataggaatatgaagccttttcgctgaaatggctgacaggcagctattcgtatctccaagtaccaacaaagcatccggcttgatttctgccatcagttcataactccttgcaacgacgtttccacatgtctgtcccagattatctcctacgacattcatccagacatccggtccgcctagttcaaagtcagaccaaaaaatatcattcaaattcttatcgtagttttgcccggtatgcgctacgcaacaatcaaaatattctctacagcgcttaatggttgctgccagacgaatgatctccggtcttgttccaactataattaacagtttgattgatccattatccttccatttaaaatcaaacatcccttaatcctccgccaatctttcctgaatataggctagttttgcaatggttgcttttgtctcttctaaagttaataatttagtattattggaattaaattctgtaagtgtatttctctttgcatcgccgtctttaaaatacttgtcgtaattcaaaccacgattatccgcaggtactctatagaaccctccaagatcaattgccttggcacactcctcgttagtgagcaatgtctcatacattttctctccatggcgaatgccaatcactttaatatcttcctttttgccaccaaataattcacacactgcttctgcctgcgtctgaatggtacaggccggagccttcatgatcagcaaatctccgttctctcccttctcaaatgcaaaaagtacgagatctaccgcttcctccaggctcataatgaaacgcgtcatagacggttctgttacagtgatcggattgccggatttaatctgatcaatccacagaggaattaccgatccgcgcgaacacatcacattaccataacgggtacagcatatcttcgtctttccggaatttctggattttgccactgctaccttttcctcaatcgcttttgtaatacccatggcattaatgggatatgctgctttatccgtagaaaggcatattactgattctacacctgcttcaattgctgcggtcaggacattgtctgttccgacaacatttgtcttcactgcttccataggaaagaattcacaagacggcacttgtttcaaggcagctgcatgaaaaatataatccacccccggcattgcagcccgtacagagttcagatccctgacatctccaatataaaatttaatcttgtcagcaacctccggcatctttacctgatattcatgacgcatatcatcctgttttttttcatcacgagaaaatatacggatttctccaatgtctgtttgaaggaatcggttcagaactgcatttccaaaagaaccggttccaccggtgatcattaatgtttttcctttaaataaagacatattttttctcctctcataactacttttctgccaagttaaaccattctacatagtcaaaatcatcataatattttttgtaagaaattttacttttataggccatgcatggtccaacacacccatcattttcaaatcctctaatatatactgctgattttatattgggatgtggtttgttaacaaatattactttattcttatatggcaaattatcaaactctactatatcctgctcagtgcacccatctctatctgtaaatagaataaacagtttatcatagtccattcgcttcgcccgttcattccattttgcttttgcctcttcttctgtcttataatgttgaaagtaaatcttaatatccttcaataagccaacagggtactctattccttcttctgttgtaaacttcaaatcataccccatatattctctcagtgatgataataactttatgaaatccttaggtcttagccaaagattaacaaaaggacttttaaattgtaacctcaaatcatgaagtatcattgccccgttacacttgctggcaatcaggcaaatatccttattaacaagacgtttcctttgcttagataaaaacattatatttctatattcatttctcagttgcctaagtacatccatcttgtgcttcctttctttgatatcactctctttacaaatactacgagtatttaatccttttgaaatatatctctggtatataccttatcttttacatcttccagcgttgcatcatatcgatttgcaattatcacgttactttcttttttaaacttttccaaatcggttacgattctgcttccgaaaaatgttgtctctgcattcagcgttggttcataaataatgactgttgcacctttcgccttaacacgtttcataattccctgaatagagctttgccggaagttatccgaatttgtcttcatcgtcagtctatagacacctataactatatttttttccttttttgaatcatatacattttcgttttcataatcataatacccagccatctgtaatacacgatctgcaataaaatcctttctggtacgattactttccacaatagcttctatcagattctccggtacatcctgataattagcaagcaactgttttgtgtccttaggaagacagtacccaccatatccaaaagagggattattatagtaatcaccgattctcggatcaaggcatactcctttaataatctgttgcgtatccaacccctttagctccgcataagtgtccaattcattaaaataactgactctcagtgccagataggtattagcaaacagcttcactgcttccgcttctgtaaatcccataaacagtgtatcgatattttccttaattgcaccttcctttaacatatctgcaaaaatatgtgctgctctgtgtaaattgtcatcgttcatatctgtcccgacaatgattctggatgggtacaaattatcatataatgccttgctttcccttaagaactccgggctaaacaatatattgctgtattgaaactttttacgaatggcttctgtatatcctactgggatagtacttttaatcactatgactgcctgtggattgcattctattaccatttttattacttcttccaccgcagaagtgtcaaaaaaatttttcctgctatcataatttgttggggttgcaactataacataatctgcatctccatatgcgcttttgccatccagtgttgctgtgagtcgtaatttttcctccctcagatacttttccacataatcatcatggattgttgcttgtttgttgtttattttctgcactctttccggcacaatatctactgccataacttcatgatgccgcgctaatagtatagcaatagaaagcccaacataccctgttcctgctactgcaatttttaaatcactgtatgctctcatccgcaaccccattctctctctgtttatggaacaccatcttcttgctcagaatataattcaatacaattactatcacactcaatgcgcatttactaaaaaagaacgattgtttcatcacttctaccaacaaaattacaccaaaatagtctaccagaaatgtaatccatctggcaaaaacaaaacggacaatttctgttataaatttatgaaatgatccgaatggtgttttaaatacaaagattttattggtgaagtagcaaaacacctttaccaccaccaacgtaatagcattcgatattttatagtcaattccgctccataccgcaaactgagccagtccaatattcagaattgtactgagtacaccccaaaatatgtagctatataattcttttttgttcacttgcttatcccttctttgcaagtaccatcgtccatgggaatggagtttttaccgatacaattttcatatcattattaacaaccattctgcaaaatttctttttggtccaatgttggatatgccccggtgtatttccaagatccttccattactttcctcttgccatgttgcatattcgccaaataggttccttgggaacacttaaaagtataaatccattttcattacacagttcttttatatttttcaatgcttgttccggatcttctaggtgttccaacacttctgaacatatcacaagatcatatcttcccttgttcaaaatgtgtttttcagcttctcccggctttcgaacctccattgtatagatatttccagtataaaagttaataccatgaatcttttcactggcctctgctattaccttttccgatatatcaaacgcatcaatctcagcattctgatacatatcttttataaatgaggttatttcgccttctccgcatccggtttcacatatctgacaaaattcctttcctgctatatccaacaactcgctgatggcatccttgaaccctttcatcatccattttacgatcggattggtcgaatgatatttatcatagtagttaccctccggttgaactacctcagtgctttttgtactcatctctgccatatgcctcctggatacttaatcctatattctcttttccttcataatcaatttttctcacatgatactgaatatcttccaatatcattctgttcttagccagtatatctgccataaatcctattataaatgtgatgaatcccataagcaataaagtacttgacagaataagagactgcacatgcccacttgcgttaacggttatcagtaaatataaatatcttatcccaagtatcaatcctgctataaaaggaatcgcccctacaaaagtaaagaactttaaaggcttatacataatgtaggctctaactattgtaaccatagactttctgacatatcccatcatactatgaaaaagtctggatggtcgtaattccccatttgtgcgaataggaacatgttccatgggaattctttctcttccggcctgcactattgtttccagtgtatatgtatactcattcgtcacatttattctcattgcggcttcacgactatacgctctgaatccactgggtgcatctggtatatccgtatccgacgctgccctgaccacccaacttccaaaatgttgaagcttttttttcattggagaaaagtgttctgtctcatcaatagggcggtctcctataacaatgtccgctcggccttctataatgggtctaaccagtttttctatatcttgtccgctgtactgattatccgcatccgtatttacaatgatatctgccccatttctcagacaggcatccaatcctgccataaatcctttagccaatcctttattctttttaaaattcacaacatagtgaactccccacttttttgcgacctcagtggtatgatctgtactaccatcattaatgatcagatattctattgtatctattccttctatagctttaggcaaatcgttcaacgcaatttccaatgtttcctcttcattgtaacaaggaatttgaattattaacttcatacttttccctttctattatatttctgagatacatcttcatcacttgactataattctatatgagttaatgtcagatctgaaaatctgtacaatactgcctttgatgtatcccctatccaatctcgttctatgtgatatacacaggctccatcctcatattgataaggcattatcatttgattaactaataatactatgttcgacggttcctctttgcatttaattacaatttcattttcggttttagtaacttctatatttctatttgttctgtttagcaaaaaaacattatcgtcaaaccgaacatacaaaacattcgaaaaatcacttttaacaacattatcacttatcttgtcatatttttccttatcaatcatactatttttcagtgtgaaaaagttaaccctctctggatttatacttatcggtgactgagaaaaaccactctgtaaaaaccagaattcgccatccaaatttcctcggtatagaaagccaaaactctgtaatgaaccaagatagttttccatatctgtagaatacacacttacttgttcattgccgtactcattaataagctcctttgtggcttttatatagctatgattatctgcataaaattcacttgcatccagagaacagtatacattaactcctgcaaaaagcaaccaacatatcactgtaattttcttcccaaatacttgtgacactactatcaaaatacaggttacgattacaaatatataacccaacttcagaaatgcaagattctccagacctcgaagtgatgcaagccaatcctctgccggtttccaggcaaaatttccatacaatatagcatagcaaaatacagtacaggctacaagcataaaaatacggaaaaatctgtcgattgctttttcttcctttttatatttctcggtaattgcataaattataatttcaattagcacaatataggttacatatcttcccaaaagcttaagcattccatctgcattataatccacaagagatgagtgccttgctgctacgaaaatcaataataatgaaataatcctcaaaaatatgatattttctctaatacttttgggaatatccttccatcttattttcagattttctccaacaataatacccgcttgtaaaaaaggataggccgtgtaacaaataatccatttcatttgtggtaacattttataactggtattctctggcccggagccagaactaaatcccaatgacaattttacaatttccaaatctattttacagccagacttcacacagtaggtcaataccacaccaccaagtaccaatcctacagaaatcccccaacatattatacacagtaatgcttcctttataacctttttgtttttcaataatggtacactacaactaaaccaaaatgcaaaccataaaggaatcaatataattgccaaatattttgtttcaaataaagcaactgctaaagcacccgcaatcgcactacttgacaatttattttttaacgcaattgtatcactaatcattatattgcgtcggctaatatagtacaaaatggttattaataatagcggtgagaataggttctctgccataatccaatccgaatacaggaaataactcggtgaaaaagctatcaacgtaagtaccaatcctctgtcttctctattttcaacaacagaagccagcattttgaagattactgccaacaatattgttttcaataaaatattttcaaagagcatcacattgcgtctccaaaataaaaggacaatgacaatataaagggatagacaaacggataatgaaaactgcttacagcttctccttgaaatatatccatggctatttgtttatatgtatattcatcgctgacgctcacacaagttccctttgcatagacataaatcagttgcagaaaaaaatatataataatacagctttcatatggtattcgtttctgttttctcatttatattcctcttgttccctattctctttaatacgtaaagctacaatctcaagcacactacatattaatgcaaaaaatacaaccggaattgccgacatcataattctattacaggaatcaccatatccatttctcaaaggatgcttccttccaaggcataatatcagatttatgagcacatatcctgtagagaaaatgagccagaaattaattcttttatttaagacaatcattatata

SEQ ID NO: 41 - DNA, 12016 bp, unidentified
  source 1..12016: mol_type = unassigned DNA
tcatactatctcacctgccgtttcccgatagatttcaaagaacttatcctcaagtggcatttccgccgtcacatgggaaagcgtgtcacacaaaaccatttttccgttgatgataatgccgacacggtcgcagatcttttcgatcagtgaaaaaatatgtgttgatacaatgatcgtttttccttctgctttcaattcctgcagaaaatcggtcacaactttcgccgtgataacatcaagtccgtttgtcggctcatcaaaaataatgatctgcggatcatgcaccagtgaaatgatcagggatactttctgtttcataccggtggagagatttgcaaccttcacttccgcaaactcatccacaccaaatttctgaaacaggatacgttttctctcatcccgctctgcctgatcgacaccgtataattctgagaaaaaatcaaacagatagttcggagtaaaaaattcttccagttttaattcactcgtcagaaatccgatctttttccgaacaccgttcggatctgtcacaatactgcttccgtcaatcagagcatcacctttatccggtttgatcagcgttgctaacatgcgaagcgttgttgtctttcccgctccattgggccctaataatccaaaaacttcccccctgtaagtacaaaaggaaagatcatccaccgcaaccttaactttttccgttgtcttttctaatttctgctgtttttttgacaagtgaaatgtcttggataatccactgactgtcaataactcttccataaccctctccattaaaaatttctatatcatgatcgtgatctacactcgcttcgctcggcagtcttattatatcgttccgtcatccatactgtcttcaatatcatcatagatatcatcgtaaatatgatcatagatgtcattatagctgctataagatccaagtcctgtaaaaaaaatcaggatatacagaataatcgatgctgcaaaaccgattccacctgtgatcaaaccaacgatcgccattccttttttgtttccttttaccagctgtaaaataccgaaaatgattgcaaggataccggtgatccagctgatacaagtgcagaacagcaaaacggtgatgattccaagtatcaacgacgcaataccaaatccttcactttctgacttgttattgccatttggctgtccataattataatctgtactgccgtttgactgtccatagttataacctgcactgtcatttgactgtccgtaattataatttgtattgccgtttccatatgacgtatttgtataatacggattgtctgtcatagtcttttctgaatttacacgctcttcatttccggtcacagtcttctctaaatttacacctgctgtaccatcagtcgtacttttctccaggctgacaggatttccctgatttacattcggctcatcatttccataattccagttattttcttcactcatactctcactacctcttaattaaatccgaccactttctgtgacagtcgatatgccgcaaccgaaatctttctgcctcccttgcccggcagattcattgcatttcccataattccggcgcgcagatgatggaataaacggatgtcgtgatccttaatatatttccacagttcacgttttttcagaagattttcctcagtgccggagcggatcaacataatcgtggaaatgaccgtgatgatttccagataattaaacatgtaatgacgcagttttcggtttggaatcttccagagatcaaattcatctaccataatcttatttacattgatctgctggtcgatacggctgatcatcactttctcattgaccgactgatcttccctgccaataaagtaacggtaaaaatctacatccatataatacagtgtttttacacttggtaatggtttgtacacataaatattatccacataaaatgtatgtttcggcagctctaatccacattcacgcagcagttttgtacgataaatcacagaatgcatcaaaatgtactgaccctttctgaaacgtgacacatcattccaggtaaaaatctgattttggggcaggttcgtgtagtgcatcacttttttatgatgcgcaccttctttttcatatacataattggcaataaacatatccagggtctgattgccgccggtcagctcacgaagtttatctaaaatcttcttataagcctcctcatctacccagtcatcgctgtctaccactttaaaataaagtcctgtcgcattgcggattccagcattgacagcctctccgtgtcctccatttacctgatggattgcacggatgattcccggatatttcttctcataggcatctgctatgtcaccggtgctatcttttgacccatcatcaatgatcaggatctcaacatcatcgccacccggcagcagggatttgatacagttttccatgtaatcctgtgaattgtaacacgggatcgcaaatgtcagtaatttcatatatgaatcctccgattatctttttgtattttctgccatgatcgcatcagcaagttccatcgcttttttcgtcatcgcatcgatattatagtatttgtattctgccagtcgtccgagcagataaaaatgcggcagtccacctgcaagcgcatgatatttttcatagagttcctggttcttcggctctaatatcgcatagtaaggaatttctccctccgctcctgtgtaggcaaacggatactctttcacgattgtggttccgtccgtgttcttttgtccggtcagatacttaaactctgtgattcttgtaaaatcctcactgaccgtgtaattgaccacgctgtgtccctgataagattctttctcataatgttcaaagtcaaatcttaaggaacgatatggaagccttccaaactgacagtcaaacaactcatccagtgcgcccgtatagataacctctccgtcaaacgttgttccatcaaaataaatctgattttcttcaaaacgcaatctctctttacagtcaacacctgtctcaaccgtgatgttctcatggtctaacatgcgctcaaacatcggtgtgaaaccttccttcggcactccctgatatttgtcctgaaaatagcggttgtcataagaaaccagcaccggcacacggcctgtcacttccgggctgatatcctccggtttttgtccccactgcttcatggtatattttaaaaatacattttcgtacacaaactgtgcgatctcgcggatgtccggatcttcattttcccgcagtttcatgatcggcacgcggcttccctctccgtatgcagcaatcagtttctgctctaatgcatctgctttttccttttcatataccatatgaagcgtatttaaattaaacggaaccgggatcagacgatccccgacctttgctaccacctcatgtccgaatacataccagtccgtaaatcttgagagatactgatatacttcttctattcctgtatgaaaaatatgtggtccataattatgtattaatattccatgttcatccggctcatcatagcagttacctccgatatgactgcgtctctctaaaaccagtactttctttcctgcttcctctgcaagctttctcgcactgacagcacccgcaattcctgcgccgatcacgatactatcgtacatgtaatcctccttgttttccactttgttttaccatagccattctattatacacattttcctaccgcaaaccaatcaaatttttctttagatattcttaatttctgccaaagtatgtagttgttcatattttatttacataattctcacaaacagggcatacggcggtcacaattccccgatatactaaattcaaagttaaggcaacaagttaaaatttttcatagaactttttttcatacctgatgtaagtcaggtagccttgcttatccgataagcaaggttcctcccagcaaatagtgaattacttcacttttcatacacactctttttcataatgaatagccggtgctgttgcaccggctccctctttttataaatattttcttttaagctttcttttcatttccaagaagaatgttcatatatttcgcatacgcagcaaaagcggacggaatagcatatttttcttttgcatcttctgcttccacaaataataatccatctgcacgatttttttcacacttcacctgtggatgcatttccggctcctctacacggactgcataacctgtcatgtgccattcgatatgggaaaaaatatgtttcgcctcacctaacggctgaatacggatcggtgcataccccatctcttttaccatggaaagtacttcctcctgtcccatatttccttccacattcggaagctcatacagtcctgccaaaagtccctttgccggtcttttccggattgcaaccttctcatcatcccttaaaatcagaaccgtttttttctcgatctttcgcggttttgccttgctcttgactggtatctgtccgatcagttcctgtttttttgcctcacaaaaatccttccatggacattcggtacaaagcggtgcaccgtttggcacacagatcgttgctccaagttccatgagtgcctggttaaacgcaccggcaagattctgatgatatacctttgccctcagatcatctgcatcctccatccatggaaatacatttttttcatttctgccgtctgccccatgcatcagtttttctaataatttttccatctcattacggaatgactgtttcatgatatccgtatcatccgcagaaacgcgcgttaaaacacggagcacatttccatcgaccgccggaaccgggattccgtatgcgatagatgcgaccgctcccgctgtataatggccgatcccctttagtttcaacagtttctcataatctgccggaagttgtccaccataattttccacaacttccacagccgctttttgcatgttcctgacacggttataataacctaacccctcccaaagctttaaaagttcatcctccggacacactgcaagtgcctttgcatccggcagtgccgtggtaaaccgctcaaaatacggctttaccgcctccactctcgtctgctggagcatgatctccgaaacccacacccggtatggagtcggttcctctcgccatggcaatacacgggcatgatttaaaaaccattgcaataatggggatacaagttgctttaagtcgtaatcttttaacatgtatgtctcaaactttctttgttatatagcagccttcatgtctgcgcttatttttttcaaaccagtaccttatttgaggtcaaactggctgacaaatactgcgatcttctctaaacatttcttaataatgtctttggaataagcataagagcagcggatgtaaccctctgcacaacttccaaatgcgtctcccggaatgactgccaccttctgttcctgcagcagacggttacaaaattccatgctggtaagtcctgtttttttgatcgacgggaatacataaaatgcaccttccggttctgtcacatccagtcccatattccggaacccgtccaccatgatctttcgtctctcatcgtattctttacgcatcacatcgatctcttcgtcacgaaccggactcgtcagtgcttcaagcgccgccacctgtgacgttgttcctgcagacatggtcgtaaactgatggatcttattcatatgaaaaataacttccgcaggacccgctgcaatacccatacgccatccggtcattgcaaatgcttttgaaaaaccatttaataccacacaacgctcatacatatccggcagcgccgcaatagatgcatgctttttgccataggtcagctctgcataaatctcatctgtaatcacaaaaatatcatgtgcggtcacaacctcacggattgcttctaaatcctctttttccatgatcgctccggtagggttgttggggaatgagatcagcagtacttttgttttatctgtaattttttcttcaagttcttccttcgtcaggcggaatttattctctgcctttaacgggatggaaaccggaatgccgccacacaattccacacacggaatataggaaacatagcaaggttctacaactaacacctcatcccccggatccaccagtgcacgaagcgccagatcaataccctcacttgctcccatcgtgatcaggatctcattttccctgtcataatgaagtccaaacttctctaaatactctgcagctgccgcacggagttcgaccgtaccgcgattatcggtatactttgtctcacctcttttgattgaagcaatcgctgcctccctgacatgttccggtgtcggaaaatccggctcgccgacaccaagtgacaatgctccctccatcgtatttgcaatatcaaaaaagtccttgatccctgaatccggcatctcctttactaccttagataagtatgatttgcttgtgtccatggtttttcctcttttctgtgtctttgtcaaaatatcataccacctatcatagcactttttctaccaaatttatagtgaatttttcccataatctattgacaaattcagggaaaagctgtacgctattaataacgtatattgttaattttttatcaaactattcaggagggttccaaacgatgagcgattttaacaatttaaaactggaagttgctgaggagattgctgttcttacaatttcaagaccagcagcattaaacgcattaaacagcgagacattagacgagttaaacacagcattaactgagatcgaagcaagagacgacatcaaagtcgtaatcttaaccggcggtcctgacaagaaaggcaacgaattcaaatctttcgtagcaggcgctgatatttctgagatggtaaactttaccgcagctgaagcaagagctttcggtatgagagcttccgtaccattcttcaaattaatgaacatgcgtcaggtaacgatcgcagctgttaatggttttgcacttggcggtggatgtgaaatttccatggcatgtgatatccgtatcgcatctgacaacgctactttcgcacagccagagacaggtcttggaatcattcctggattcggcggtacacaaagacttgcccgtttagtaggcatgggacgcgcaaaagagatgatctttacctgcgattccgttgatgcagcagaagcttaccgcatcggtcttgttaataaagtagttgctccggaagagttaatgaacacagcaaaagctatggctaagaaaatcatctccaaaggaagctacgctgtttccgttgcaaaagcagcaatcaacaacggttatgatatggacatcaagaacgctgttgagatggaagcaaacttattcggcgtaacctgctctactcatgacaaaacagaaggtatgactgctttcttagagagaagagctgctgatttaacagatttctaaaaaaacatatcaaaaaaacgggctgataattcagtccgttttttttgatatactcatattccaaatttaatgtgcaggtaatctctgattacctctacgcatttttcacgcccccatcaaaaccgacaccaccggcatcgtcaccacagcaagaattgccgtaagcgcaactcctcttgccgccagatcataatttccatcatactgctgctgataacctttttccgctgtgagctcactaaggcatcttttttgcagatcaggctctttgcctcctgataacttttgccataatcctgtggattctgatatggtctgccaagaatacaggtgcttttcatccggtgacaaaactgtggattgtcatccagttcatttaataatctttccagactgtggatcagtctgtcatcttcatagtccggaaataaaatgacacctttattcaaaaaattcataaacagggctgcatctccaagatccgaaatcatttttgccatacagctcatataataatggtatgtatgttcatcattttcaagattttccccatagacactgtctaccacaataatccccacacggtgtggaaccgaaaaatccatatgaaacagtcccgcgattttttcaatataccgcgtgttgatatcatacccaaacaataaattatacaaaaattctcctttgcggtttgtcttattattttcctcaatcacataatttccaatgctctgcgcaatatccacaaaagacgctttttcccaccggatttgaaacaaaggtaaagttaatttttccgcgagatcaataatatccactggcacctcttccctctcatccttaatggaaattgcaaaacctgatatcttaagttcatcaagttcgcgcatggcactctttacttccgcccatccaaaacgctcaaaatctacactgcagagtgcaaaatccccggcattcatatggtcggcaaacggtctcgtcataaccacataactccatgacactacacgatccagaccgccttctccggctaacagccacattccatccagattcatctgtaagatatccctgcattttaccatacaaacaccttcttttctattgaatcaaaaaaagcgtcagaaccctcttagttccaacgcctttgtcaataatttttatcatttgtatgtaatatagtcgatagctatatttttgtcaatatcccgctgtttctatatttcagtggagaaatgccatatgtttttttgaaacttctgataaaatagcttacattctggtatccgctctgcatagctgtctccgtcactgaaagatcggtgtcctgtaacaactgttttgcattctccaaacgtaaatatgttatatattgcgacaatgtaatatggaaatgttccttaaaataccgcgatatatatttttccgaaagatgaaactgttccccaaattcctttagcgatatctttcctgtaaaattctgctgtatatatgaaaccatctctttttctacaatatttctgccgcttgtatcattttctattacaaatcctttcttccacatttcaagaataaattgtaaaagaattatttttgtctttatctgcgcagttatttttgactcagtttcatcattttctgccatatatatatcaatcagctgctcacacagttcttttgccgagtcttttactcttgggtttatcatcaaatgaccgctatttaatggttcaagcaatttatcatctaacatgtcatcggtccgaaaagatatatattttaacggaaacaaaaatgtaaaataatccacggtgccggtctgtgagcccataagatgcagattgcccggcgatacaacgaacgcatcccctgcttttccaatataactctctcctgatatacttaccgtcagcaaaccactttttacatatataatctcaaattcatcatgccaatgtaccggtatctgaaatgaccgccccgcattctctatgtgatatatactaaatggattgtcctttgtaccatgtggtttattttcctttaattcaaagtacatactctctcctacaattctacaaggctcttgcttttccattttccgctcttccatctaagcaccattccaacagctctcgcgcactcatcacctgccatggcaatatatgctcctactgcctgaagtcccatatgtattccaagaaaatatgttccaccaactgcaaacagatacataaatatcgcacccattataaccggaaaaaccgcatctccactggtttttaatgcctgaccatatacaagatttgtcacccttccaaattcaaggaatatatctactattaacagccttaccacaagatttatcatttgcgcatcatccgtaaatatatgaactataaaatgtccggacatcgcaaatgtcacagagaagcacgtcgctgttataagaccatataccacagctttccgcgtacccctgtcacattcttcaaactcctttgatccaattctccagccagtcataatagcattagcctgtgcaagtgcagctcctatacaatacgaaaaatttgctatctgcatagcatatgaacgggctgtaacattcattccgactgcatccatctgattcatgaatcttactataagtgtcattgcaacattataaagtgctgtttcaaatgcagaaggaaaacctatcttaacaatctgcgcaagtatcttccgtggcggaatgcgctccggactctgctttgcctttatcagtacagcacccatgcctgctacaatgataaggttcacaacttttgaaataactgtggcaatagcaacgcccattactccccaatgaaatacaaacaggaacactgaattaaatattatattaatggcatttcctgcaatcgttcctatcaaggaatgctttgtatatccaaacactctgagatagctggaaaaaatgggaataagcgcatttaaaacacatgcacctccaacaattttaaggtatgtttctgccggctcaagcaaagccggagaaatacttacgattctaagtatttctccagaaaaaaaggcaataataaccgacataaggatacctgtcagtgcgttaaacataagtccaagctgtctggcctgatatgcaattccaggtctccccgctccgatattttgtgacataactgctaccataccggatgatattaccccgaacatgatgataaaaacacttatatacgtatttgctgttccgacagctcccacagcctggtcgcttacagacgataacataagtgtatcgaccatgcctgaaagcatataaaataaagtctctaagcatattggcacagccagctgtgtcaatgtttttctttcagttgccatgtttttctcctatgaaaactaatataacatacattatcaataatatggtatttttctgcatatttcttgtataatattatgcaaaaattgcattatttctacttatttacgaagtgaatcagcaagtctgttaattttgccctgatctgcattatcataggaaaatattttatgattccacattctcatctctgcataaaatgttgacgtttccccccaaatagactaggatagaatttgaatgataaatacgcaaaacaaggaggaaaatcctctgctcctgcaatggcagtcgcattttgctccgcaaaacaaggaggattttatgttagataaaatgattggttttatcggtgccggcaatatgggaagcgccatgatcggcggtattctggatgcatctttagtgactaccagccagatcatcgcaagtgcacactctcctgagacacttgataagatccggacaaaattttccatagagacaacccagtcaaacgaggtcgttgcagaacgaagcgatattttgtttctcgctgtaaaaccaaataaattttccgaagtacttccgcagatcaaaggtcatttaaaaccggactgtatcgtagtttcgattgcagccggacagccgatcgcaaatatcgaggcgctgctcggtgaggtcagactgatccgcgccatgccaaacaccccggcgcttgtaggcgctgcgatgagtgcactctgtccgaatgacaaggtaacaccagaggaagtaaagctcgttgagtccttattcaacagcttcggccgtgcagaagttgtaccggaaagcatgatggatgccgttgtcggcgtttccggttcttcccctgcctatgtctatatgtttattgaggcaatggcagacgccgccgttgcagacggcatgccgcgcgcacaggcttataaatttgctgcccagtctgttttgggcgccgcaaaaatggtattagagaccggaaagcatccgggcgaattaaaagatgctgtctgctctccgggcggtacgaccattgaggcagttgcagctttagaacatggcggtttccgtgatactgtgatcagtgcacagcgcgcatgttctaaaaaatcatatgatatgagtcaaaaataa

SEQ ID NO: 42 - DNA, 8701 bp, unidentified
  source 1..8701: mol_type = unassigned DNA
  misc_difference 2021: note = a, c, g, or t
  misc_difference 2022: note = a, c, g, or t
  misc_difference 2023: note = a, c, g, or t
  misc_difference 2024: note = a, c, g, or t
  misc_difference 2025: note = a, c, g, or t
  misc_difference 2026: note = a, c, g, or t
  misc_difference 2027: note = a, c, g, or t
  misc_difference 2028: note = a, c, g, or t
  misc_difference 2029: note = a, c, g, or t
  misc_difference 2030: note = a, c, g, or t
ggtatagcagagatccacatcattgaaggctactgcaagaccctcgtagaagccgccaagctcttcaaacctcttcctctgaagcatcaggcaggctccggtcacccccatcatattgtggacataccggttccttccataatagtggtcatccttatcatccagaagctgcagcttatgcgccggtcccacatgcagattggtaatcccggcatgctggatcacagtagaatcaggatacaggagcttagcacctactgctcccacccgcttcagcgatgccttttctgccagcttcacaagccagtctccctgaatgatctccatgtcatcattcaggaaaaggagcagatctccttttgccatggacgctcccagattacacatccgcgagaaattaaaggccatggactcataatgatagcagatttctctgcacaaaggataatttttctgctgtagtgcttctatattttgtttaatcaggattttattttcttctctgcttccattatctacgagaatgatctcgtaagggatcccccctttggtacgctcggtcaacgagctgatacagtggaacagcacctccggattatccttggaagggatgataactgataccagatggtctttcccatcttccggctgccagctgtcctgtctttcatacccgaatgcacagtccgcgggcagccgcatttccttcacggctccatacccttcctccgccgtatgatacagcacctcatctatatgtctgacacagcctttccctgtcagactgatttcctgaccgattccccggttgatcacccgataacacagctcatagactgcatttttccgggtcagagcctcctttgctgacaatccttccacaagctgcttattctgatcaaggcactcgcacacggctctcgccggaagtgccaccagacttcccatatagaaatacgaaaggaaggtatccggagaccagtccggcttaaaccagggtttctctcttccctgttctgccatcacatcttcatctccatataccaggaccggcatttcttcattccatgtcttaaacagcatcggcagcgcaagatctgacagcatcccctcagccatggcaaataaaatagcatttgtatttttttcttcgccaaatgctctgatctccgggatccaggcctcttctccctttccatcctgccagaccggcaggcaaaggaatttcactgtattttccgtaccttcttctttttttcgtacttcataccagacaggtgtccggatcatttttgaatgtattccttcatttttgtatccggagccgtcctgtgtctgtttttttgcttcatttttcagacatttctcatgtactgatataatgatcttatcaattcgcagtttttcttcctgttgcctgatccatccatcataggtcattttcagcccattcagttttttttcgtaactcctgaactgttttttcatcaggatattttttgcaaaccgtttcagatctgtcacgttcattatcctttccggaacagatgcttacacccgttcataacatcaaaagccatatccatcgccactggggacagcttcatccgcaggtgcaaggtattttcaccggtaaccggcatctccagtacagaaaaggtcattcccggatccatggttgcaaatacccatgtctgatcctttaccttcctgccattggtggcaaaattcttatcacttaactgtactctgcttccgttcagcagaacctcttccatccttacgatacagcttctgtctgcagggtctacccgcagcgcccgtacattgccgtcaaaaggaatatccacttctatggtatcctcatctgcatatacatccggcagatactctgagttctgctcactgaagccttctccaaaatcacggtacacctggatcctatcatccagtatcttctgcagatgcccctttgccagcttcttcacatcaatacaataggtaccgatcccggcccggannnnnnnnnntttccctacacgacgctcttccgatctcccatggacttatgctttccggtcacctttttctggaacgcctcttccctagcccggtattcctctgcctcctgctgcgtgatatgaagcctattcatgatccggtcaagatccagtttatttcttctttcttcttccagaatatagcagtagattgcccggaaggcgatctcctttgtactgatcttttcttccatcgtccactcataatcgatcacagtgaaccggtcatcctttacaaggatattggcaaagatcagatcgtaatctgtcacaccgctgtcttcgccataggaaataagctgcagataccgttcaaacagccgttcaaattcctctgtatcatcctgaaaaagtgccttatccatcaattcttccagcgtcacaccctcttcaaagtcaaagccggcatagctgccatccgccggaagggtacattcattaatcctaaggtcacttcccgcataacgttcttttaacaatttgcaggagtgctccatttcccgtacatggccttttgcctgctctgtcagcggatatttccggatttccctgccctctgctgtctccagaagtgctgtgcaaagctgatagctttctgcccggtcattgctgtatttcacataggccgcctgtggcatttcccccgtgatcaccataaaggaattggagaaatccgggaagcttccatcctcgatcagtccgtcatatacatatttttcattaaaggtaatcagtctgtccctgtcaaagttccggatattatctgtcagctctcctaccactggcagtctcctgtcagagtagatcactgtcgggaatttataatccgggtagggataatagaaggaataatcagatactccacagctttcaaggatcctgcagagtccctttctgctgaaggttctggcactgccgccatccggatatccttcaagaccggaaaaccacgttcccaggtgatcctccttgcatccggcaaagtacttaagtcccagcttattttcaattgcgatcaccagatgaccgctctttttcacatgacgcagcatgatcttcagaaaatcttcatagggtgttttcgaggggatataggatgccccatattcaaacacaccgatcagacatacgaaatcatagtctgccggaagctccggctcgatatccttaaagtttcccacatggatcgtgatattgtcctgatcctggtttctccaggcattgatatggcttcttctggctgacagatccacacaggtcacttctcctgccttctgcgccagcttgtccgtgatcgcaccacatccggatccaatctcaagcaccttatgctccttcgtaatgggaagccattccacaatattggcgcgtaagggagataaatgatacaggatcggccagctgtttttttcctcgatcagctcctgatattccactttggaagcatttttcacgataccaagcagttcatcctcgatcgctccatcactatacagatcttttcccggataatggctgtaatccagtctgacactgccgattctttctggcaggctgctgatcagctcctcctgctgcagacggatcggctttcttactccatcctgattcatgggcttactccttttcctgctgtgaaagctccttcacaacgactctggaattcatatcatagtatccaacagtatccttatcagagatcaccgtcatgtttatcacatcatacagtctgtgatatacctgaaactcttccttttcaaaaccagtcacaccaaacgaaagaagatactctcctccctgcaggtcgatcttctgggtaaaggtgatctccatgtcgctgcctgccctcaccggagaaagaaatgccttttccaccatggtattggttcctgtgatctccacacccttgatattcttgatcgtaaaggcaaaaataggagcttctatatcatgctcaaaatgcacctgcatggtgatcgtacattcctttcccttcagcaatgcactggtctctcttcccatatcatctgttattttatatccggtgatcatggcgtccttcgttccgtattccagcagctccggattcacttcacccttcactgtgccagccgccgctgccgctgctgcggtgatctccttatcagaaaggaggctatgatcgtccgcagccggtacgtactgacctaccagcacctgtttataagcatcgatcatttccttgggggagccttctccaagcttcacgccctggttcagcagtacaaccctgtcacagtatttactgatgctgcttaagtcatggctgacaaaaacgatggtctttcccatctccttgaactcctcaaacttgtgatagcactttgcctgaaagaaaacatctcctaccgacagcgcttcatccacaatcaggatctccggttcaatattgatggctacagcaaaagccagccgtacaaacataccgctggaataggttttgactggctgatgtacataatccccaatatctgcaaaatttaaaatatcatccatctttgcatcgatctccttcttggagaagccgatcatcgtaccgttcagatatatattttcaatcccgttatattccatattaaagccggcacccagctccagcagtgcggagatccttccattcacatggacagatcctcctgttggattcagaacacccgttattattttcaggatcgtagacttgccggagccattggttccgataattcccaccgtctctccctgatagatcgtcatatccacgccctttaaggcatagtgctccttgtagcgcttctttctgccaaatccaagagcctccttcagacgatctgaaggcttatcatacagcttataggccttttccagtccttttacctgtattgcgacctttttttcatccattttcccagttcctttctctgtcctgtaaagtatgccacagtctccctacagaacatctgcaaagtgaaccttcaaccgtttaaagatcagtgatcccacacagaacagtgtcacagtaaagatccagaaatacgtggaggaataaaaatgttcaaagaaccattcatctccataaatcgcattgcgatatccattgacaatataaacaaggggattgagcttcaccagcgtcaccagtctgtcatccccgatctggccgatgttccagaggatcggtgttgcccacatcccaacctgcaggccgatattaataatctgggaaagatccctgaaaaagacggtaatcgcacaggtacagtagctcattgccagcatcagtacaaacagacagaagctgtaatacacgatctggatcgtatagatggtcgggtagtatccgtagattccggctacaacaagcagtactcccgcaaaaaatacatggataaaggtagctgctaccagcttaatgatcggcaggatactgatgttaaataccacctttttcaccagatagctgtactccagaagagcattggtgccgctggtgatcccctctgaaaaataaaaccagggaacaagacctgctgtcaggaaaagcacatacggtacctccactccgctggccaccatttcacttctggtattaaagatcacatcaaaaaccacataatacatggccaccgttacaaccggctgtaccagtgcccacagaaatccaagataagaaccggcataacgctttttaaagtcatttttggcaagcttccagatcagctccctgctctggaaaagctccctcggaatgataaacatcctgtcataatacacactgaagatcacacatgccagcaaaagaagtgcacaggcacagaatttcttcagattttccgtgtggatatctggtgccagcggattattatggctgactaccataatccccaccagaatacagatcccccagaaaatgccaattcccaccggctttggaacagatttcagcacagatgccagtgatttcttttctttactgttcatgctgtccttttctccattcggtgtaagctttaagtccgccccacttctgatccttgtctgacatcacaagctcagttcccggtgcaaagggccattccacgccgatatcaggatcatcgaacttaagaccgccctcatcacccggatgataaaaatctgtacatttataagcaaactccgcatagtcggaaaggacaaggaagccatgtgcaaaattcttgggaataaaaaactgcttcttattttctgcagaaaggacaacaccatgccattttccgtaggttgcagaaccgggacgcagatccacagccacgtcaaatacctccccgctcaccacacggaccagcttgtcctgtggatattcaatctggaaatgcagtcctctcagcacattcttcacagaggctgactgattatcctgcacaaagatctggtcaattcctgctgccttataatcattataattgtaggtttccataaaataccctctggcatctccatataccgccggggtaatgatcttcagtccttcaatctcacatgtctcaactgttatttttcccatttctgtccgggaacgtctctacagaccttccgcaacctcctttaaatattggccataattggtcttcatcagtggctccgccagctttaaaagctgttccttatcaataaagcctctcttataggcaatctcttcaatacaggagatatagagcccctgtctcttctggaatgctgccacgaaatctgccgcatccagcagggaatcatgatttccggtatcaagccacgcaaagcctcttccaagggtttccacccgcagggttcctcttcgcagatattcattgttgatactggtaatctcaatctctccgcgtgcggagggtttcacattggctgcgatctccacaacatcattgtcatagaaataaagtccaggtaccgcataattgctctttggatgctcaggcttttcttcaatggaaagagcctttccgttttcatcaaattctacgacaccatactctctcggatctctgacataatagccgaaaatggtcgctccgctttctctggctgcaacctcccgaagtacctttgaaaagctctgtccataaaaaatattatccccaagcacaagtgccacagaatcatctccgataaaatctgcgccgatgataaaggcatcagccagtcctcttggctgctcctgtaccgcataggaaaacttcatgccaagctggcttccatcagaaagcagctcctcaaatacgtggatatcacgtggtgtagatatgatcaaaacctcccgtatcccggccagcatcagtgtggataacggatagtagatcatgggcttgtcataaaccggcatgatctgcttgctgatggccttggtgagaggatataatctggttcccgaacctcctgccagaacgattcctttcattgcataaccctccattccatgcattgcataatctatatcagtataccacaaaatgggagtgattgtaaatcactcccattttatctgcgttttcatgctctgtattttattttgtatggtacatatcttcgtaatacttctgataatcaccgcttgtcacattcttcatccattcctcatgctcaaagaaccatgcgatagtctttttaatgccatccttaaaacaggtttccggctcccagccgatctctgccttaatcttgtccggtgcgatcgcatagcgtctgtcatgtcccttacgatcctctacataggtgatcagatcttcactgaccagtgcctttctcggatcatcatcaggaagcatttcctgcagagtgtcaagaataatatgaataatctcgatattctgcttttcattgtgtccacctacattataggtttcaaacaggcgtcccttttcctgtaccatatcaatggccttggcatgatcttccacatacagccagtcacggacattccttccatctccataaaccggaagcttcttgccctgcagtgcattgttgatgatcagcgggatcagcttctccgggaactgataaggtccgtagttgttggagcaattggtaatattagccgggaaatgatacgtatccatatacgcctttaccagcatatctgaccctgccttgcttgcagaataaggactgtgtggtgcataaggggttgtctcatagaaataaccgccatcctcacttaaggaaccatatacttcatcggtagatacatgcagaaacttcttatctgctttaaaactgccatccggaagctcccaggctgccttggcacagttcagcataacagcggttcccagcacattggtctgtacaaaaacctcagggtgtttaatactgcggtctacatggctctctgctgcgaagtggactactctgtcaatatcgttctcagcaaacaccctgctgatggcttccttatcacagatatctgcttttacaaaggtataattgtctcttttctcaatatccttcagattctccagattgcccgcataggtcagggcatccacattgatgatcctgatctccttatcatatttcttaaacatataatgaatataatttgagccaataaaaccggctcctcctgttaccagataggttctcat

SEQ ID NO: 43 - DNA, 11486 bp, unidentified
  source 1..11486: mol_type = unassigned DNA
tcagccattgtaaacctccaaaattctctgttcaaatttttctctgcctactctgtcgattgtaaacttaaatcgttcgctcggctttgcgttttctgcaaagaagttaagagcggcatcacagatttccataagtttttctttattttcgataaacggaataattgtttcgcccttgttgattgagttgccgaaaagtccgccgaatgaaacaatgtaaccgtgaattgtgtcccacgcatctgtcgggcaagccttgaagcatctgccgcagtagttacactttgaattgtcaacggaaattttcccgtcctcaagattgattgcaccctgacggcaggcctttacacagactccgcagccgatacaagcgtcctctttccatgaaaccttgattccgcccttgataccgacatcgttttcctcagctttaaggcagttgttctgacagcctgttatgccgaacttgaacttgtgcggaagttcctttgcaaaatatctgtcgtcaagctcctttgcaagagcgtatgtatcaatacaaccgccggggcagattgcctcaccctgacaggctgtaattgttcttactctcggaccgcaaacgcccggctcaacatcgccctcggcaagcgcgtccttaactgcctcaacatcatcaagctttacaaaaggaatttcaacactttgtcttgatgtgaggtgaacataaccgtcaccgtagttttccgaaacctcggcaattttcgcaagctgtttagctgtgaggttgccgcctacaactctgagcctgagtgaaaaattatttttctgtttttgacgcataaagccgccctttttaagcgtagcataatcaactgccatttctcttactcctccgattcattcacatttatactgtctacagcctgtttgaagtcagactttaaatcctcaatatcttcaatgccgacgctgattcttattgtatcatcaaacacgcctgcgtttcttttttgttcttctgttccgtgagcgtaaattgtgcttgacggatgaattacaagtgttcttgtgtcgcctatatttgttgcatttgttgcatacttcaaattgttgataagcttaaacgctctttctttacttcctgccctgattgtgaggattgcaccgccttttcccttcaacagcttttgacaaagactgtaatatggagaagcttcaagagccggatagttgacttcgattccgttttgtgtttcaaagaactttgcaagctcaatagcgttgtaacaaagacgctccatacgaagtccgagcgtttcaagtccgacagagttcataaaagcattaaacggtgcaaggcaacagcctatgtttcgccagataccgtttctcagctttgcaacatatgcaagccgaccgaattttttgtactctgcaagacctttgtatctttccgtattccattcaaaattgccgctgtcaacgattattccgctgattgaatttccgccgccgttaatgtactttgacgaggaatgaacaacgatgtccgcaccgtgttcaaacggctgaataagatacggagttgccgttgtgctgtcgataatgagcggaacaccgtgtgaatgaacaagctctgatacagcgtcaagatcggcaatttcaagtccgggattgccgataagctcggcaaagactgcttttgttttttcgtttatgagcggttcaatctcctcggctgtcaccttgttgacatatcgtgtaacaattccgaaaggctcaagatctccaaacaaatcaattgttccgccaaaaagacctgcgcttgctattacctcgtcacctgattcaagaatgttcaggagtgccatcgtaacggctgccatacctgacgaacacgcaaccgcaccgacaccgttttcaatggaagcaattctgttctcaaaagatgttaccgtgggattgcctattcgagagtaggcgtagccgggagctctgttgttgaacaccttttcaagctgttcggcagagctgtgcgaaaatgcactgacctgataaatgggagtcaaggttgagccaaaaaccttttcaccgttaaaccccttgtgaagtaatgcggtgttaaactccataatatcaccaaccccttaatttcatacaaccaacccttttgtgtaagaccgtcgtaagaatttgtctgacggcttcgattgatataggtagattatactccattaatcatagtatttcaataggtttaataagattttacctcttgcacaatttttctttaaaatttgccgtaattccattatttcctacaatgcatatttgtttagtaggtattgatttttaaattaaaaactgttaccattattatatactctttcagcaaacaaaacgcacggaaaggagatgctaaaattgaagatttcaacaaaggtggaattcggaattatcgctgttattgacattgcgtcacactcactaaacggcaatgcggtaacaactcccgaaattgccaaacggcaaaatatatctaaaaagtatcttgaacagattctctcatcactcagctcggcaggacttgtgcgaggtcaaaagggttcaaacggcggttatgttattgcaaaaaaccttaaagggattacattcaaggatatcataaacgcacttgacgcaaatgttctgagcaatgtttattttaacactcggggcgatgatgatattatgataagacttatcgacaacagtctttggtcgaagatgtcgtcatatcttcaggaatatgccgaaagcattacactagcacagctttgcgatgagtatatcaaaaacaatgaaattgaacacaacattccgatgtactacatctgatagattacaaacaaaaagccaccgatttttatgtcggtggcttttcttgtttttatcggattttatttaaagctttcaataacctgacaggttttttcaatgtcatcttccgtgtgcgcaaatgaaacaaacatcgcctcaaactgtgacggtgcggcatagattccgttttcaagcagatgattgtaatactcggcatatctctttgtgtcggctgtggttgctgtgtcatagtcaacaacctttttgtcggtaaaaaatgccgtcataatcgaacccacacggttcacattaagtcctgcgttcttcattgcattttcaatctttgcagacttgcgttcaagctcgggatatatcgaatctttatttttttcaagaattttaagcgttgcaatgcctgcacttaccgctaccggatttcccgaaagtgtgcctgcctgataaacagaaccgagaggagcaacacactccataatctcttttcgtcctccgtaaaccgcaagcggcattccgccgccgacaatttttccgagggttgtaaggtcgggttttactccgtaaagcttttgagcaccgccgagtgaaagtctgaagcctgtgattacttcatcaaaaataagaagtgagccgtgcttttccgtgatttcacgcaagaattttaaaaatccttttttgggcggaacaacacccatatttgcggcacaaggctcaacgattacacaggcaatttcatcaccgcagttatcaaaaagctgttgcacggattcttcatcattatactttgcaaggagagttgtgtctgtgtagcctttcggcacacctgcgctgttcggaattgagtttgtcagaagtcccgaaccgccttttacaagcaagccgtcggaatggccgtggtaacagccctcgaattttacgattttatccctttttgtaaagcctcttgcggcacggattgcgctcataaccgcctctgtgcctgaatttacaagtctgagcatttcaattgatggcatatttttgcggataagctcggcaagttcaatttctccgctgtggcacgcaccgaatgtaagtccgttctgacaggcagaagtcacggccttgataacatcaggctgtttgtgaccgaggatattcggtccccatgagcagatatagtcaatgaactcgtttccgtcaacatcataaatttttggaccctctgcacggtcgataaaaagcggagttcttccgaccgaacggcacgcacggacaggactgttcacaccgccgggcataaagtcaagcgcctgtgcgtatagcttttcgctttgagttgtattcataaaagcacttccctatttgtaaaattcgtcaatccattttgcaacatcaagtgcgtggtatgtgattatgatatccgcacccgccctcttgattgcaatcatattttcgaacacaattttcttttcgtcaatccagcctttttcggcagccgccttgaccattgcatattcaccgcttacattataggcaacaagcggaaggtcaaagcgttcgcttgcggcttttacgatatcgagatatgcaagtgcaggcttgaccataaccatatccgcaccctcgtcaatatcgtctgcaatttcacgcagagcctctttgccgtttgcgtaatccatctgatagctttttctgtcgccaaattcgggggcagattctgcggcgtcacggaacggtgaatagtagcctgaggcaaattttgcactgtatgacataatcggagtgttgataagtccgttttcgtcaagtgcgtttctgattgcagacactctgccgtccatcatatccgaaggagcgatgatatccgcacctgcttttgcaaggctgacagccattttagagaggagcggaagtgtttcgtcattgagaatttcgtgaccgcaaacaacaccgcaatgaccgtgacttgtgtattcacaaagacagacatcggcaataataaggagtgacggataatttttctttatgtatctgattgcgttctgagttacaccattatcgtcataggctgatgttgcaagctcgtctttatgctttggaattccgaaaataagaagtcctgcaataccgctgttttcaatttctttaagaatctcgtctgctctgtcaagcgaatactggtagacattcggcattgaatcaacaggctttttaatattttcaccctctgcaatgaaaatcgggtaaatcaaatcgcccttgtcaattcttgtttcacgaacaagactgcgaatctgttcgcctgctcttaatcttctgaatcttctcatatatttatccttctttcaaagttacttccttgattatagtttccaaaattccgtctgtgtccttcgtttttgcaatcttgaacgaatttacgccgtgactttcaagtgcctcggcggtaatttcacctatgcatacaacggaagttctgtcggaaatagttgctccgccgtcaaaaaatgtgttcacacccgacgcactcgcaaaagtaataaaatcggtatcaacaacggaattatcctgctttttctcaagctgaatgtcataggttttcacatcgtcaaagtcaatgttgttatcagccaaaatccgagtgagttcgggcgaaccgttttcggcacgcagaatcaatactttttcgccgcttttcaccgtttttgcaagcaaaattccaagttcacgggttgtgtagacattcggaatacagtcggcaaaaattccgtacttttcaagtacagccgctgttcccgaaccaatcaccgcaaacttaatattagcgaaactgcggatatcctttttcagcttacgcagtcggctcataaaaatttctgcaccgttcatacttgtaagcaccacataatcgtagccgtcaatgccgtttattgcattgtcaaaaacttcgttgtcatgatattcaatcacctttaaaaggtcatgccttttgacctccgcacccgaaagcgtgagtattttgccgagcttgtcggaaagctttctcgtacccgtaacggtaacggaaacatttttcaaaggtcttgtaattgtgggggcaaagtcaaaatttgcagtttcgccaaccactataacggcaggcggaacaacctctgcggatttaacattttcgcagattgtcgagagagttcccctcacggtctgattttttgcacaagcgccgtttgacacaactgcaacgggagtatcctccgatttaccgttacgaatgagattttccacaatatctgggagatttctcaagcccataagaaagacaagcgttccgtcggtttcggcacatttctttatattttcgggcagggtgtcctgtgccgtatgtcccgtgattatatgaacacttcggctgagatttctgtgtgtaacagggattcccgcaagttcgggaacggcaatcgaggaagaaattccgggtacaatgtcaaacggaatatcggcacttttgagggtttcaatctcctctccgcctctgccgaacacgaacggatcgccgcctttaagacggacaaccgttttgccctctctcgccttttcaacaaggatttcgttaatattctcctgcttttcgctgtgtctgcccgaacgctttccaacgcagattttttcagccgtttcgggtgcaaaaccgagcaatgacacatctataaggctgtcgtaaacaagcacatcgcaatgtctgatatactctgcaccacgcattgttatcaggtcaaaatcgccgcatcccgcaccgacaatatacactcttccgttactcaatttcgctcaccagcctttttgcaagtttgattctgtttgaaatttcatctgttccgctgactgtttttttacagtcggcagacagagaaagcgttatcctgtcgttttcaacctttgaaattgcaccgacgggagttgaacaatcggcattgaggctgtgcagaacctgtctttcggtttcaaacgaaagcattgtatttttgtcgctgatttcagcgagcattttggaaacctcgctgttttttctgctttcaatcgcaactattccctgacacggtgcagggagaaattcatcggcatcaaacggagttaccgtgtaatcctcaccgttgcaaaggtcaagtctttcaagtcctgcctttgcaagcacaagagcatcgtactcaccgttcaacagctttttaagtcgggtgtcaacattgccccttatatccttgaattttgcattaggatagattttctccgcaaaaagctttcgccttaaactgcctgttccgattataaagccgtccttaatttcaaaattgttgcgtgtaacaaaaacatcgccatagctgccccttggcaacacggcggaaatctcaagtccgtctgcaatttttgtcggcaagtcctttgcgctgtgaacggcaacatctgtttctccgctcaaaagtgacatttcaagctccttgatgaacacaccttttccgcccaaagctgtaagcggtttgtcaagggttttgtcgcctgttgtcgaaatgtaaaccgtttcaattttaacattcggaaaacggtttttcagcgtttttattaacatttcggtttgtgcaagggcaagcctgctttttcgtgttccgatttttatcgtcattgttcgtattcctcaatcaaattttcaacagttttttcatcgggttcaagtcccgaaaggcaaagcgaaagaagctgttcaaaaatctttcttctgtcatcttccctttcaactttctccttaattatcgggcgatatttccacaaaacctcggttgtgttttcgttcatactttcaagaattcccacaaaaagctctttaagatattttgcgtaaatcggacttttgcccgatgttgtaattcctgccgttatgccgtttttgcttgcaattgcaggaaaaataaatccgcatttttccttatcgtcaactgtgttgacaagaatatttttctcattgcaaagctgaaaaattctgccgttgagcgtttcatcatcggttgcgctgataacgcaaaatgcaccttcaaggtcgctgtcacaaaatctgcggtcaatgattttcacattcaaagccttgatttcatcgcagattttcggggcaacaacggttatgtcgggcgaaaacggcgtcagcttttcaatctttctgagtgcaaccgtaccgccgccgactacgagtatttttttgttttcaatgtcaatataaaacgggaagtatgccattagttattctctccgcactttctgtagatttcaagaattcttgcaaattcttctgccgaaacgtcggatttcagcttataaatgaatttttccgaaaaatctgacggcattgcgtttttcacagactgcataaacggcagaaattcgtgaaaggcaaggtcttttttgagaacttcaatttcctcaaaaattatttcttttgcactttcaacgctgtcgagtttgagagcattgttctcgtttgcaagctgttttatgcagtcaatgttaatgagccttactccgcttattttggggatattttcgtcaatgtcgggcggtacggcaaggtcaataaacagccttgatttttcggtttttatattgttttttaaatcataatatgtaaccgtgtaatgcggtccgcttgtggcactgattacgcagtctgcaaaatcaaacgctttgtatctttcgtcataatcaatcacattcgcacccgtattttcaaaaacagtttctgctttatgttttcgtgaagtcacggtaacgcttatacctttgtgcgacaagagatttttcacaacagttgagccgaccttgcctgttgcaccgattacaaggacattcagctcaccgtctttgaattttgccgcctcgtttgatgcaagagttgcaacggaaaccgatgtttttgaaatggcggtttcggtcttgattttttttgcacaggcaacagccgcctgaacgcacatattaagctcatatgcaaccgtgccgttgtcctttgcaaaggcgtaggctcgctttagctgaccgagtatttcatcttcaccgataaccattgattcaattccgcccgccaccctgaaaagatggagcaatgccctgtcaccgtagaaaagacagatgtacttttttagttcgtcaaaatcaattcccgaaaaatccgaaagaacggtttcaaccgttttcacagatgattcgtcaccgcaaaaataaacctcggttctgttgcaggtgcagagaatcaaacactcgctgatattttcagaataataaagttcgtcaagaaatgtctttttttgctcatcgggaaaggcaagcttctttctcacaaccacatttgaagttttgtgacttacgctcaggcagtacataaaaatttcgctccgttacaaataaaatccgacagtaaaatacacttttaaagttattttattactgccgacagctattgtcaattaaagttagtcagttattttaccactaaacctatctgtttggtatgttttaattatactacattcaccattctatgtcaataaatttcgggttttgcttgacaaaaacagtgattacaatataaactatacaaagatacctcccgtcagcaaacaacgggagttttattccaatgtaaatacttattgtaccgataggaatactaaatgatttgaatatgtattaaggagcgtttttatgcttaatcagttttcaagaacacagcttttgattggcaaagaagctatggacaggctttcaaaaacaagagttgcaattttcggaatcggcggtgtaggcggatacacggcggaggctcttgcaaggagcggagtcggcgagcttgaccttattgacgatgacaaggtgtgccttacaaacatcaatcgccagatttttgcaacaagaaaaacagtaggcaaatacaaggttgatgttgcagaggaaaggctcaaggacatcaatcccgacataatcatcaacaaacaccaaaccttttacactcccgaaacctcggaaaaattcgacttttcaaaatacgactatgtagttgacgcaattgacacggtaacaggcaaaattgagcttgttatgcaagccgacaaagccaagacgcctatcatctgttcaatgggagcaggcaacaagcttgatcctacagcgtttgaggttgccgacatttacaaaacctcggtctgtcctcttgcaagggttatgagacacgaactcaaaaagagaggtatcaaaaagctgaaggttgtttattcaaaagaaaagcctatcacacccgttgacgatatggcaataagctgtaaaacaaattgcatatgccctcccgaaactgaaagaaaatgcacccaacgcagacaggttcccggcagtaccgcatttgtcccgtcggttgcaggtcttatcatagccggcgaagttatcaaggatttgattaagtaaatataatttttaacaaagcaaagcaccgagagaaattaccctcggtgctttgcttgtttttataggattttttacagttgatatcgtgattaaacagattagatgataaccgattcttcctgaagtgatttgttacggagaatctgaacctcatcgcctttggtaatgaaaagccgataaagaaatacattgaccttttctccgacggtaatcggagtttcgtcaagtcctctgtacgcataaaccgtgcctccgtcacattttacggcaatttcgatattgtcgcctctgaacgaagtctttataacctcaccgacggatacagacgctttttgtgcggttgtttcgctgagctttgtcacctttacaaattcgggacggataactgcacggtcaacattatcgacaacatcaaaggtcttgaactttgtataatcgtcaagcgtagtagtctgaccgaaaaatgatgcggaaaatgcggtttgaggatgctgataaatgtcaatcggcgagcctatctgctcaattctgcccttgtttgtaattataatttcatcggcaacttcaatagcctcgctctgatcgtgagttacaaatatacttgtaacgccgagtctttcaatcatatctttaagccatgagcgaagctcctgcctaacctttgcgtcaattgcggcaaagggttcgtcaagcagaagaagattcgggtttggcgcaagcgctcttgcaaaggcaacacgctgtttttgaccgcccgaaagctggcttggataacgcttttcaagtccttcaagaccgataagctttacaagctcgtttactctttccttgataaatttcttgctctttttctgaattttcagaccgaaagcaatgttatcaaaaactgtcatatatctgaaaagagcgtagttttggaatacaaagcctatgcctcttttgcttgcgggaatatcgttgacaacctttccgtcaattacaatttcgccgctgtcgggattttcaagtcctgcaatcatacgaagaattgttgttttgccgctgcccgaaggaccgagaagtccgataagcctgcccttttcaataccaaagtttacattgtcggatgccttgtagtcaccgaaagttttatttatatttttaagctcaacatacat

SEQ ID NO: 44 - DNA, 27106 bp, unidentified
  source 1..27106: mol_type = unassigned DNA
gtgagcgcattacgttggttttatgcagttataatttatatccatcatttcaaaaggggcatatttacagtgcctgaaaacgtaaaacagaagcttgtatgtataggcaatatgacgaactttgataaggctacgcttgttcaactgtttcttgttcagcagtcacagcttcaggatattgaccggaagcttcagctgctattggaacaggtcgctgtattgaacaacaaccgttttggcaaatcttccgagaaactggatactgagaatcagatctgcttcatggaagtagatggcaacatcgttttcttcaacgaagcggaagcagttgcttcgctcaatgaatacgctgatgaagatgaaaccaagccaagaggcaggaaaaccaaaggcaaacgagaaaaggatatccggggacttcctgtaaatccggtggaacacaagatgtccgaagaagaactcattgccgagtttggcaaagatggctggtatgaacttgaagacgaaatctaccgacgttatagtttcacacctatgaaagttgaaatagaagaacatcatgtaggagtctacaaatccaagaaggataatcacttcaaaaaagcggagcatccggcatacctgttaagaaacagcttagtatcaccttcgcttcttgccggcgtatggaatgccaagtatgtaaatgcaacgccactctatcgtcaggaaaaggaattccagcgaatggggcttgccattgatcgggcagatatggcacactggacgattttgtgtgcagagagatatctctcaatcttttatgattatctgcatcagaagctttatgactatcatgtgcttcaggcagatgagactccggttctggtctcgaaagaaaaccgaaccgatgggaacaagcattacatgtgggtgtatcgtaccggtaagatgtatgcggacagacagatcatactgtacgattaccagccttcgcgtaatgcaagccatccaagagatttcctcaagatgttcaagggaatctgcgtaaccgatggttaccaggtctatcataccaccgaaaaggaacgcgaaaacttgaagattgccggctgctgggcacacgcaagacgtcgctttgacgaagccgtgaaagcattgccaaaggataagaaaaagtcttcgctggcttatctggcactaaagcagatccaggcaatatatcgcgaggacaataaacttgcagataaatctgcagaggaacgtttgagacatcgtcagctgacagtaaagccactggttgatgcttactttgcgtgggcaaaacagaaccagcagtctgtcccagccaaaagtaaaactgccaacgggcttacctactccttaaatcaggaaaagtatcttagaactttcctagaagatggagaagtgccaatggataacaatgccgcagaacaatccattcgtcctttctgtgttggaaagaaaaactgggttatgattgatactgttgcaggagcctaggccagtgcaatgatttacagcattgctgaaactgcgaaggcgaataacctcaagccttacaattatttcaagtatcttctggaagaaatcccccgacacatggatgaccatggtgtggatttctgtgaaaatctgcttccctggtcagacaagctgccagcggaatgcagaaagtaactttaatgatatgctgctctttggagcggttgtttatgtgggtgtacccactatggagcgtttactatgaatacatgataacctcctgatatttatgctattatcaggtccaggattctgtccgcccccccgggtcagttttaagtataaatcaacagtagcaatgtcatattcacggcagatatcgcatctgcgtttgccggaacgatatagttccaccagttgctgtttgaactcgtcagtatatttacgaggttttcttcgttgttttggttcggtcataatgagtgctcctttgtgtatttattatagattatatgaccttaaaaaatctgtccagttaattgtaacctatccaaagaaaccctctcttaggttatatccgggcatacatctcaccacctacgcttccgctaattttgcaattttatgataattagcaatccattttaccaacgttcttatatcatcttccgtattatatcggcctattgatattcttacagaagaatcaatccgtgcctcatccaatcccatcgccaacaatacatgcgatctatcttgtgacttagaattgcaagcagaaccgatagaaatacagatatcatgcatatctagcatatttaaaagaccttccccatcaataccagagattgcaatattcaaaatgccggcagctctgcttgaactatcaccattaatactaaaatctatttcattttccactaatagcgtacatagtaagctatcaagttcagaaatatggttgtgaatactttccatattggcaacattgtcttcaagtgcttttgccatagaataaatacctgcaacattttcagtaccagatctcattcccttttcctgtcctccgccaactacatacggtgcaatggaacatttcttacttatatataaaaaaccaattcctttaggcccattaaacttgtgtgcacttgcagataacaagtctattcccatttcttttacatcaattttaatgtgcccaacagcttgcactgcatcagtatggactaatgattcaggattgtcctcgtgcaccagtctagcaatttctgtaacatcctgaatagcacccacttcattattctgaagcataacagatactaaggtgggttccttatctaacactgccgccaattccggtatgctaaccaagcatttactatctacaggcaacaacagtacgttcttcccctgtaatcgctggttctctgccggatgtagaattgcatgatgctccaccactgaagtaattactttttttgccttatctgtggccttagtcataacccagttatcactttctgttccgcatgatgtgaaatatatttcctccggctcagctccaatacagtcagcaatgatttttcttgatccttcaagaagtcttttcgtctgccttccgaagcgatatactgaagaaggatttccatatatatgggtagaaacctccattaatgaacttaaagcgacttcactcattgcagttgtagctgcattgtctaagtaaaccattacaatccccttactttaatatcaggcattctgtctgtaaattctcgatctatagccgacagttgctgtctgataatttttcttttttcaaatgctggatcaaagcacatcatcttaaattcctgtggagaaatatccgaggcagttcttacatgcggatataacaacttcaagtatgcagaacacattttaataaccgcatttgtatctcttgtatcagcatttttaggaatatccaacaattcctttactattgcactatagaatgactgagttctgatatatgaaagtatctctgaaaaatactcaacattcaatgagtatccgtttaattttaagtcctcactgattcgaggcaaataccagccttcaataaatccatggaatctgtcaattaacgcatgatcctgaaatgcctccggtaattcttcaaaataatggttattcagaggtctcttgtttgaatccaagtcaatatttcccagtaagattattcctgccaatgatgtctgttttgatttacctactgtgaatgccccctgctccatgtagttctttaaagcaccctgtatttcctctggattatcaaatgaaatagtcttaacctcatccaatgaaacaaattcatatgacggaataataccaggcgtatttctacccatatcatagaacaattttgctctggtaatcttaccgccacttatttgccatccatgcttagaaaggttattaaaaatgtatgatttaccagtacccttaggtgccagttctatcatattaagatttggttcaacaaaaacaagtaatctggtcagaaacaataatttctgatccaacgactcaaatgaagtcgaattaggattatactccatattactgataaggaaatcaacccactcttcaagatcaaagtgttctcttgcctggcagtaataatcaaaatcaggtctatacggactaaacggtttaaatttaaccatttcagcgtagcctttttccttcccatccggttcaacatactgcatggttacaacaccccagttttctccttctttaagaagcccctgctgacgtgctaaatatggtgatactcttccctcaccatttttgattcctatatctggtatttgaaaacgatattctccacttctaatatctgattcaaatattattcttgccagaatctgaatcacatcaccatttaataaacggcttctgatattgctatccttcgttggaatatgcttatcaataaagttatataatccttccgtgtctatagtgtcatcgttagaaaactttttaataagccaatcctttataaacgaaggaacatttacaccagaaaacaggctatatctgtcaggagtcttatgcattgactcttcaggaaatatgtcttttatttttttatctaaattagtcatcgaatccatcatcctccatcatatttttcttagctttgttaacaacatggaatttatattccttacttgcaataattacctttatatcctgttctttaccagatgataattcagcagaatacattccactatcagctactaatttatgtttagttccatcagcctcaataacatatgcttcctctgtatcaggaataattgcgaatgttactttcttgtccagaccagtaacctcaagtttatcgtccacaaccttataaacaacctttttctgaccagtctgtggactggcaacaattaccggtacaagcatttcctcaattgtggcaccaccatggttttcatatttcggccggttatataaagaagtctcattaagagaaataatatatggattgcctggtttcccttcgtcttcataaacaatataatctacggtatctgtaaaatcatctttcgatgcaatcttacagcatcttccctcatgatccgatccatcgaagttatattttttcttggtttcagtccactttgcccttgctgtagcgccatgatctgctgtaataagaatcttctttccgtcagcttcctggactatatctcttatcttttcttctaatatatcaaaagcttttctcagatttattgccgacttgtaaaactctccatgaataactatctggtcaaaatcgaggaaccattctttgtatccaatagatgccatgtattccttattaacgtctgttatggaaggcaaatggcaggaagcatagtcacaatactcaacttcatatccatttataacaagcaactctataatgagcggtgtatattctgcaccaactccatctaaaacgtaaatatcagtctcaccaacatacggtgcaattagtgtttcttgtctctgaagttcataatacatactgtagaggtttgtagaattcgcacatccactcgaataatactgctggagatactggttatctgaatctgcaaccttgctctctctataggcttctaagtagtatttccactcattttttccttctatttcagcctctcctattccaaataaataagaatagaaagacggatatacagattttacttcatccttatccaaaacaccatttttatatagtttaataacaaattctttttcggtattgctcaatccggtatacgcaggcttaaaaatcttggtataatatgaaaaaagacgatttctcatatcctctatcgtttgaccatattgtgtgctcaactctaccaaacatatttcggatacattaccgttcacaggaatgcttagttccttagatattccttcacatataacctcttgtatttctttttccggcgcaattgatccggcgtatttattaagttctttaattattccaattctttcttctaattgaacaggattactcaaccaatatccctgttgccagatggttatcagatattctttttttgaatttgttttaagcaccttaaatactcttgcaagaaaagacattggataaaaaactgctatatagcatctaataaaccatttttcatattgtgagtctgatgtaagccatttcccggcaataacataaattgaattaacatctatacctaataccgccgatgccaactcatgtaatcccttcccagacaacatattagtatagtcaacacataactggttccaatatgcctcatctgttacactgtagcggaaatcaatactttaaatcgcaggccttttcaagatattcctttgaattgtgaacaacatcaatctgaaaagcattatctggcgaggccttctgatgccactcatacaagctttctgagcaacaccatattggagaaccaaaatccaacacttcagatgatctccacagtccaagccattctacacttgaaataattttatttttcgtaatatgatctgagtattcattagccacaaaacatactcttctattcttacctataagctcataatctgaatttaaaaacggatcaagcaaatcttttctggcaaagctactctgcaatactttatacacattatccatcatagaaaaacatataaagataattcttctttgagacgcatttgccccagaaatcccggaattttctatatcaaatagtgagagcaccgtggattcaatatcctttttagaataaaatctaatcagttctgaaaaacccaagacatatgtatccctatcctttgcagaatattccctaataacatggacgaacttagtctttgtcatccaaccatcatctttcttcataagataatcactcagatcaagcagttctccgtttccggctttcaccaattcctggatatcttcctgagtatgattattcatttccataaacagaaaacgcactggatatctacgatatgaacttgtacccttatttttatcttctaaaatcttttgcttgattacttctacatccatatttccgcctattcctcacctaaaaatttcataaccgctgagcatacaacaggatactctttacaaagcttaacaagaatttcttttgcttctccatcattaaactgcttctcataaataagttttgttgttgcctcaatcgttgcatgtgtctttcctatagcaataggttcaatatctattggttcaaaatccggactttcaaaaagatcgtcatctgcttcataatcatcctcttccccagaaatgctgtttacatcagactttcctgcattgttcggatttatatctgtatcatcctctgcactatcaccattatttgaaggcggattcacaggttgcttactctgcaatgcacaccataaaagaacttgtttttcaacgtcttcttctctccagaatacaatagcatctgatagattctgtttaaggaatgccatcaaattagaataattgtccagtttataatttacagttgcaaggcacttatcaacaaaggcattgatacaggccgaatcctgtaccttttctaatgtaagcgctattgttgtcttctgcttttttaagccttcaagtagtctgcttacatcatcttgagttatactatcacctgtcgcattagcaagcttaaataactcatcaacaactgaattgaactcgcttcctttatcaactacatattttaatgcccataacggcgatttatattgtttttcaaatgccgatctcagtgaccactttgtttctgaaataccgtcaccctttactccaaaaacactctgaatcaaatcaatcaactctttttcttctacagttgaaaatctaactctaagtttagcatcagctttttgatccaaccaattataaaatgcagcattaacaatatctcgcatgattgtggttgacaccaagcttccttgatctgcaagatacatttttccaatatatctacggaaaactaatgctactgcagccatgcaaatatagttgttgtaataaccgtatggtggctgtgttaaaaacttaaactctgagccgatatcgactactgttttatttcttagttctgcaatcttatcgtcaatgactttaaccagaaccgtcataggaacatttacatcataggttccaatatagtctaatttctcgtcaaaaatccaatttccattcttatcttttaaaaggtttattacagcagattcctgaccaccaaatgcctctatgtctgatctacttaacgcatagcaaactttttcaactgtctttttagcatatgtagtcttccaagcagtactagcgttcgctattttagataacttctcagcgccatctgtaaatatccttccaacgcttgttattacacctgaattgcttacagacttaaaacttgaagtattaactctctctccgtggaaaataatagttgccgctccatcaagcaactcagttttccatttttccatccacttcatagccctcttttcataaggagtaggatcttcaacctttgtatcttttgcgacagtttcacgtgctttagcttcaataacgccttcaaatctttgctgtccaagcgttgtgtctgcaattacgaacacaatatctttcattgtttccctttgcgacaatgcttgaatcaaatttttctgattttcgagagtagcttctggacgatttgatttcttatcataggttggtgtatcacctctaaaaacaataattgcaatcttcgctgcataatcttttgaaaaggctttcagtagttttgactccattgatattgccgacaaacttccccataccaatgaaaactctgttattctattaaatccgtccgcattagaaatagcctttgtaatgtcatttctataacctatatattcatcaagcaaagaactaacatcttcatacttcaaatacagcttgtcctttgccgcctggattttttccataggcatagccgatgaagaaacctcatatacttcatccggtcctttaagaactatctgcttttcatcaatagaatccaatgctcttgtaatagcatcactgctccattcaccacttaatacatgaagaatattctttttgctaggattaactaaactcttctcctgatcggcaccatccatctgtgtcacacgattcaaaagattcaaaagaagtattaccttaaatgcagataattcaggcacatcggtatcttccagttttgttgaatacatagagaacttataaattattgcatcaaaattatttgttctatcctcagaaaatgccttaacaaagaaatcccacactttatcagctgtaagatatttaacatcatctatatcctgttgtatgaaatgtttaaatcctttattctcatcattcaaaaactcgaaaatacttctttctgcagaaccaatagctctcgaaacaaaagttgcaagatatgccgtataaggatgaaatggatataagtgttgaataatatccttagtctgcgcagacttatccataggtgcaacaatttcatctaatgcctgcttaacttctatctgtccagctatacgatcagtaattaactgcgaatattttggctgatcactaatcttcaaggcattcgaaaggatatgatatgttgttatatcctgcatatcatatttgaggccgaggaatcgtgcctttgccatcgttttctcatcttccttaagttccttatagctatcggtagcctccatgctcttgtgtgtaatcaagaaaacatacactccgatgtatttatccttatcatcttttcttggagccttactaagttcagcaatatcctgcatacaatttaggatactacgacgttcagtaatctccagcaaagaggtaaactcatcccagaaaataacaaggtaatctgccacattttgtttacgaagagcatccattacttcggtaagccactgtttaatatctggtgttgcttttatcatattagactttttgagagcaatgttaatctcctttaggacattaacatcaccaatttccagagcttccttcagctcatcaattgatgaagcatacctatccagctcgtttttaagcatgctttcccaaaaagaagaaaacttcttatcttctaacatttcaataactgcttggaaatctgatttaactgtaatattcacaccagcatcatttaactgctgtgtaactgctctctgtattgtatattttaattcttcagtatctacaatggagtacgtacctttaagcacaactgggaacaccctttccttctttcggaaattaataagcatccccttaagctgcggattagccaatttatcaatataatctgtaatatcatccaaatcgtcacttaataaatgcttaatcacagctgttgaatggctctttcctgtaccatacgtaccctgtacccaaatagacttgtgttgatcacctgttaacgaagtaaaggcattcacaatctctttaaggtttgactcaaatttttcatttgtaataaactgtttccaataattctccttctcctctgtcatattgaaggtagaatcaaagaaaggttcaatttctattatctctgagtacttcatgtcatcctcctaaataaataatgtgcagccttcttccttaaactgctcaattttttcagtcaatgtatccacatcggtatccaacacttctgccaaatgttctcggcagaaatactgtttaattttcttacccaatagttttttacacaaagctacatcatccttctcaagttctgtatcacaataataacatttctccatttttacatcctctttatcgctgcggcaagtgcttcatctggagtcatttcttcattaagatgaacattttcaagaccccccgtcaaatctgcagtaagtattcctgcctgcgtcaatcctcttagcgcagggataagattctccggagtcattccaaatactgtgtaaggattaatgccctctggaagaatcagatcgctaaccgtgatatcaaaacactttgaagcatgtgcctctttatataacaaatatgctaacgcatgcatagaaacatacgccggtgaaatcctcttaacacctttacaactatttccagacatttgaagttctgcaacatatatattctgcggatcttccggttctgtagaattatgtcccaatggggagtatctcaacatagtaatcaatgcgttagtaggatttttaattgtattatcgtttaatgtcgggaagccttccctcataatagccacaatatcatcccttgaataattcacatcaagctttattgatttcacaaaactgttaactattgccgaattatacgcaaggccaacccagataatctgccatgctgccaacctattatggtcatacaacctcttaaccatatcaaatttgtctgaaattttcttttctttatcatctatcatttctgcttcacggagccagttgatagcagctggtatcatcttgcttccaagattcggatatgatccaaaccaatcattgccgttattgaagaaaacatctacccattcatctcttaaaccaaatgtagaatatctatcaataccacttgttctcatattggaagatttaacaagcattccaccctcattaatctgtttcctgtgtgctattatgcagcctcttgaactaacttcaaggcacttatggcagtgaacacacatgtttttgtttatctctaccttatctcttaccgtaagagctcctgtcgggcattctgcctcacatacgccacagagttcacaaccagctgttttagtaagcacacgagaaagcattccatgtaaagcaggcttattaacagtaccttcaactataaatcttacagtcttaccagattcttctacactaaatctaaagaattctccattaaaattcagttcacccttggtaattccattctcaacggttgagatatattcacaaagagcagttaaccatattctccaatctgattttggctgtgtaacaacacactcaaaattcggttctttacttataaggtctacacgagacccatctggaataagtcctcgaccacctgcatttttctgccaattgtttgaactaatataattatttatcttttctttggaagtaagccccaagttttttgccatctgctcaataactgctacatactgctttgaaatttccggatatattcttcttatcaaatattcagaccaatcagatgcaaaaggacatactccgcatcctacacgagttaatcccattctataagcaggattcagttcaattcctcttgagaacatatataagaatacttctgaatcattccatctgaatatcggtctgcagttaaaaagatttggatgcttaacatttgcgccaattctttcatatgcagatctacgtgcgctttcatcagaacgaactccttcataaactgcaacctttggctgcttgtctgtattgtgtaattctttcattgttcttctaaaaactgtggtcttcattacagagcaacaccatctattaactctgctaggtggaccatactgcttccacaaatccagcgcatgtctatcactctttgcatgatacagtttgaaattagggaagcgatatttataatcttcttccgtatacgcaacaatgtcataagtacaaggaagttccatatcagtatcctgaaaaacagccttaaatgattctaccggtaaaactctagtcacaagatccagaataacctgagaatctttaccaccagaaaaagcaacaacataatcatcgacttttcctttaaacgtttcatagcaccccattatgaagtccattgcctcattttccattgtttcaatagcttctctattgatttcaagcatcttatctacatctactggttcgagagtactaaaagtaaaatccgaattataaatcacatctggcttgctatagatacctgcccctcttctctcaaaaaaaggctgacctttataataatatcgtgcatcaatattccagcaaattggtaaatccgtcttaggcattctatattttttattgacttcgagcatctgtaattcctgcaaatacacaggtcttggtgcaggaatagcttcatcatctgttatattgtcactcaaaataatgccattattctgaacattccatttaactttaaacatacttgtctccgtttctaatagccataagctattggtttattttttaatccaaaaactctttggcatcggatatatttttgtggccattatttttcatccactcgtcaacctcattcacgtcaaaacgccacaagcgtcctttttgatgtgcgggcataccctctttttttatccagttcattacagtatctctgcttatatgtaagtatgcgcaaacttctttcattgaaagccacttgttttcttgcattgtattaacctctctttagaattcagttcagggagtacacatattcaaatgtacataaaatacccataatataccgaattatatggtatcacaatttcacgtccttttcaagatttttcttgattaaaatcagttatagttgtataataacgtactttgcatatttccgatgttttttgtatttttttattgttttattaaggttaatttggtgtatttatccccatctgccacttatcatgtccctggatactttttaccgcttgtctcagtgtatttgctcttccatgctgatgatatggatgctgaaatctatgcttatgaaacaaaaccagcgattcatcctgcggatactctgtataatgcaaataccaataatgaccggtgttcctgctctgtattgttacatccttcccatcaagcataatcacattaaaatactgcttgtctatctgagataaatgttcctgattaaacatctgctctcccttctgctgcaaaccatgtagccaatgcctttttcaaaatacactccattgttttctggtcctttccctcgaaatatttctttggatatcttctctgacaccttgatattcataggtctgtccttaggctctactgtctttgtgagatatctactgaccatagtaaattaagattgtttctttgtctcgacctcttctctcgcatgatcaaccgtaataatcagctttctatcttcacatttcaccagaatcggagcttccaaattcttcaagccataatccctggatcctcaacattggggctgacttgtagccacaaccactgaaactacttactttcaattttctgtaatcttttctttttcttgtcataaatttacccctttcgttctatattctatgttgtttggaacttcattatagtacatagccgcatgtcccgtcaaacaaaatttgtatagtcgcatgtccattttaaaaacacatggtcttatgtccatttttgtgttatactatttttgaaaatttaacccataagggcagattgtgagattagataaatgagtaaagagaaaaagactgggaggaaattgacgcaggctcgcaaagaagccaatgccagatataatagtaaattcgtagaagtaaaagtccgtatgacgccggaacgcagaactgttgttcaagaacatgcatcttctatggaagaaagtaccaccgctttcatcaaccgtgcaattgatgagactatggcccgtgaccaagaaaaaaaatcaagttcttaaaacaaaaaagttggttcatcccactatttggggcaaaccaacttctcttatttcttggaaaaactgacagtttcaagtataacgcgcatctagttttcaaacttatcattccaaacctgtctttcactttttgtcttaactgcttctgaaatttggtcatccgtcaaacaataaccttgttcctgcatccttacaatttcctctagttctgctagtgcaagcctgtttgcatcttgtacaaaaccatcgcctatgtattcaacttttcttaatattcgaactttaataacatagcctttttcaagatattcttttattcgcttttgtacaccattcttcctaacaccacttaaataatcagaaatatgccctcctttaaacattctacagaaaatatttattgacttaccaacataaaatggtatttcttccatatcttttacggcataaaatccatatactcctctgatacaactgtcaggatttatttcctcttgtacatttatattaatagattttgccatctcgattttttgttcatacgtcattcttcttgccatttttactcctccgtaaacttcaaaagttttgcattatccatgcttcctaacaaatatcgcaaaatctaaatagtaaccgccacctttatcaccccagcccgtctattctcaaataaatcataagcttcttctatctgagccaacggatatgtgtgggtaataagcggtgtagtatctatcttgccctgttcaataagcgcaagagtttcagcacagtcacagccgtctactcctcctgttttaaatgtcagattttttccatacatttccggtagtggaagcatttgtgcattttcatagagtgcaactattgtcacaacagcgttaggtcttgcacatttccaggcaagttcaaaggtgctatctgctcctgcagcctctatgacaacatctgcaccaccgtgttcactttccttttctacaaaatccacgcagttctcaggctttacagtaagaacctcaggataatgcttgttgataaatgcaatcctgctgtcatccgtttcgcatacgatgattttctttggatgttttagcataacgcacagaagtgtacatatgccggtaggtcccgcaccgataatcaaaacggtatcatcctctgtgatttcggaaatgcgggctgcccaatatcctgtagcaagcacatctcccactagcaaagcctgctcatctgatacagcatcaggaatcttgttgagtccggtatttgccaaaggtacacggacatattccgcctgccctccgtcgattcgacagccgagtgcccagcctccatttttatcagtgcagttattgacatagccatttttacagaaaaagcattctccgcaaaaggtttccacattgacagttactctgtcgcccacattgacatttgttaccgctgagcctgtttcttccactatgccaaccatctcgtgtccaactgtaataccttttaccgcacggggaacagccccatgcttgatatgaatatcgctggaacagatgctcgcaagtgttactttgacaatggcatccgtaggttcaataatagtaggtttctctttttcaattagggcaaatttgcctttatctacataggtgtatgttaacatttctgtttcctttctgaatggtaaagtattctaccgcactcaggcagattgatattcttattgtaccatattcccgactatcattcatctacattttctcatataaaaaaacatgccaccataccctctcaggtacagtgacatgtctccatctccggctattttgcttcacgatacctcttgcaccaaagttcttttatccgaaaactctgcttgcaagtatgaacacatcttttgcactgctcaaagtaatctatcttaccatttccgttcaaaaaatatgcccagtaccttttctctttatccgtcataggatcacctgctcttcccctgcttaggaacattgggcgcctttacttctggcacctttgcctgctctccctttgcacaaacagccacaaatgcttccgcaccatactgatactcggaaggttccgcaacagcagatacgaaagatacatcttccataacctcttcggtatgtttctctgtatcaacttgcttatcattcatgcggttaatctctacatttcttgccaaatcctccaccttatcaatggatgcatccagacgaagtaccatggattcatacaccttcttctgccatttccatgatttcttgattacctccgtcttggaaaatctcttctcctgcccggaataatcctcctcttccctgtcggcgaaggttctgaacgtattcgccaccttctgtccggcttctctcattcccttaccaaatgcatcaatctttgagatagtatgctccgtatcgacaattccctctttgaccttattcctgatgcctataagtttatctttcaagcccacaaattcgcaaacacggtttaaggcttccttgcctcgcatcttaaaatcagccacaatccctccggctttatgcctgatatcctcctttacttcaaagagctggtatggataggttacaattaactggacagattttttaaggtcatataatctataataaatacacaaaggagcactcattatgaccgaaccaaaacaacgaagaaaacctcgtaaatatactgacgagttcaaacagcaactggtggaactatatcgttccggcaaacgcagatgcgatatctgccgtgaatatgacattgctacttctctgtttgacaaatgggtaaagcaggcatccaattccggctctttccatgaaaaagataaccggactccagagcaggaagaactgatccggcttcggaaagaaaaccagcagttaagaatggaaaatgatattttaaaacaagcggcgctgatcttaggacgaaagtaaatgtgattaaagcaaatgcccacaaatactctgtatcagcaatgtgtcgcgtcctacaggtaaacagaagcacctattattatgaagcagcagcaaaaaaagatgaatcagaactcactgcagacattcaggaaatttttagaaaaagccggaaccattatggtacacgaaagatcaagaaagaactggctgattgcgggaaacaggtattaagacgcaggattggacggatcatgaaacaggaaggtctgatatcaagctatactacagctcagtttaagccgcaaaaagacagatgtaatgaatcaaaagtggcaaatgtgttgaactgacaatttcaaaaccagccataccgtaatgtggtggtaagtgatttaacttatgtaagggtaggaaaccactggaattatatctgtgtactgatagacctttttaacagggagatcgttggatacagtgcaggagaacataaaacagcagagcttgtaaaacaggcatttcggaaggtagaaggcaatctgtcggaaatccaatccatatcttccacacagaccggggaaaagaatttaaaaatgagacgattgaggaactgttagaaacgtttcaaatagaacgttctctgagccataagggatgtccttatgataatgcagtggcagaagccacgttcaaagtcattaaaacagaatttgtgtggaatgaaaaatttcacacactagaagaactgaagataaaactatgggattatgtaaactggtataatcatcaccgcatacattcttccttgggatatcaaacacctgtacaatacagggaaaataacccaaaaaaatttgtctgaaaaagtgttgacaatccagtttactccgattattaaataagtgcaacctcaatatttttgtctattcgacctacttcaatattcttatctacccaaccttcaaaattcatcgattttatacggctttcagggcattttttagtttcaaaaactgtaggtcataaagtgcggaaaagccttattttaagccgtttttcacacttttaattatgtactttagtcaacaatacgacactctcaacgtggctcgaggcgatagcaagtacgtcaggcctcctcggtcgtaagcggaaactgctcaaccgccaaaatccgctctttggtcattcgtggtaactggtcaaggcgttttttcggtatttggtcgttaacgggaagtggtcaacgaagagccctttccagttcgccctcactgtagccaaaggtataaccctcgtccttaccattagaagcccagatcaaagcagcgtcatatacgctgaggctctcgccgtcatcgtcatcatccgattccccgaaaggaatcactctgccacacttcgggcattcccagtttccgtctccgatgtactccatatctacaccgcatccgtttccacatccataaggaattataatctcgtacctccgatttttatttttgcatcttcttatttgagttcttccggattcgcagtaagccagttacggatatcgttctttttgtctttgaagagctgctccctgctgccctggaatacaattatcgtggactggcccttgcgtctcaattctgcaaagtaagagcaataattcaggaacatcgtatcgtgctcggcaataataaaggccttcttgttttttgaaacctgactgtatatcagtccgagcagtctcgctgtctcccgtttgcccagtccttttgccggttcatcaagtcctatcatggagtacttattatcgtttaatgcctcggcaagctttattctctgattttctccgcccgacagagtttttactttctggctgagcttcaaatagccaagtcctaaatcagagagaagcttcagcattttatccgctttagcggaaatattcataccggaagcaataagctcatcaatggtcatttgctgtatgtcatatatattgacaccatcgactttccactcgagaacctcctgcagatatccggtaccattacatttatcgcaggtaccaaagagcttctcctcataaaaactgccgatttcaattacaccagtgcctccgcatttatcacaggcacctttgcctctctgagaaaaataacctttatccttcccaagtgcttttgcataacaggttcgtatctcgccaaggagcttcgtgtatgtggccactgtagtaaatgagtttccttttaacggcttctgcgaaacatacaggtaatcctcataatacttggggagaatttctctgagaatcgtcgtcttgccgcagcctgacattccgcagagacccagtacagatccatgcggtatttccagcgcgcttcctgcataatcgacataatccgaatccagcactcgggtgtcacaagatgttctcttgaaaaactggtaaggcagagaaccttcctgaagcttcatatactcgtttttactgatcaggtaaccgccgttcttgcccccgtcatgtccaagatagatattgtgatcagctttttcgatgaccttatcgttatgctctaccacaagcaatgtattcttcttgcgcatctcatccatgatgcctatcgtaaagtcaacctctgcgggatacaaggatgctgtaggctcatccagaacgataagtaaatcatgcatctttcctataagaagctgtgcgatgcgaagcctttgcagctcacctccagacagcgaagctattgatcttgtaaggctgagatatcctaacccgaccttcttgcatgcggtaatgaaggtgagaatattatccagagcgggctgaacattcttgccggcactcttcttcagtttcagcaaatccttttcaagagtatcaagatcttccgtgtagaggctccccacggaaaatccttttgacagttctttcgctgcagtcttcgctcttagcctgctgccagagcaacaatcacacttcttttgagcacagtactgttcccgattatgagagaacatatcatcagactttttctccaaaccggttatcggtccgatatagcagctggtcttggatcttgacctttctccggctttgtacttaaatgtctgtttaagatttcccgtgccgtacagtaatttctccttctgtttctcggtcagctccttgaagcgcttattactgtctattccgcattcatcacaatatgcaatcaaaagctgtctgaagaaatctacataggttttctgccagcaccggaaaggaacctctgaaatctttttgtcataatcaataatactgaccggatcaggctgtagcttatagccaagcccctggcattcccggcatcgtccatccccgttatagttaaaatcacttagaggaagccccatgatgcttccggccacgtatataacaaacttctgcaaatcaaaataactcatgacagttgatctcggattcacattaaagttcagctgccttaaaggaaccgacatgatcacatcgtcataggaatccacatcataatcaacctcgaccttgttgtcgttggtcattttgtcgtactcagcctggctaatcccggaaatcgtgctgaaagcaagacttgatttgccgctgccactgacacccgcgatacatgtcataccgcccttatacaaatcgacatcaatgtttttcagattatgtgttctgattcctttgtaagttattttttgcatgttgtcacccatagataattgtcatccaattcatcttccattttttctattccactatagtctaatcgccttgcggagaaaagaagctccataccggcttcctccagcatttgctcaacctcggagataaatggaacgtgtaggtaaaattcactgccgtaatcctcaagctgttcatctcccagctccagctgctgttcccagctcatattaccggtatctatgccaagggtctctgccttttcgctccagtaggacttcttcaccttattatcaagatacggtgtcgtaaaaatgaacttcccatcatcctttaggagcctgcaaacttcctttactgcggagaggcgttcctcatagctttccagaagcatcagcccattgaaagaaaaaataacgttatcgaattcctgatcctcaaaaggcgcagagaggatatttccaacacggtagtcaattgcaccgttcacggcttttgctgcggcaatcatcttttcggcataatccattcctgtaatctgatagcctctttcgtacaggggaatagtcacacgccctgctccgcagcctatatcaagcgtcctaccttcggtcttaaagtatttctctatcagtatctcttcataatgaaacagtcctgccgcgttgaagtctgtatagtaattaacgatttctgtttcattatagcttttcttgtttgaatttactgtactcatcctgtctactccaaataatccagcaacaacttcctgtactgattctccttgaattcaggattgcagtctaccgcaagcatgtcgccatgccggttcatataatctattctgcagccgccagcgcaaatatatctgagctcacatttactgcatttagctataaagtccgtagatgttttccggttcagctcgttaaaatcctcgaatatctgaaccatatcctcaccaagaccgcgatagtatgatgaaaacttattgcacggataaatcctgccattggcatctataacaatatttgttccgataccgcagtttttgaaccggacattccttccgctacttgacgcctttgaaacacccctgtcctgaagctggctgacaagcaaaatcatcagtttatcagcctcatacttattgaatccggtaaaatccattgtcagagcgtttccggtcatctcaatgtcatcgttaagacgtatctcaagattctcatattcaaatgaatcgacaaagtttattaagttttcgcggatatcatccaccgtagaagggaggatggtgattgccagggtaattttaattccggtagttttcaacaggtcgatggcgtgcagagctttggcatagttgcctctgcctcttatcctttcatacggctcctgtgtaaccccctcaaagcttatctgtatctcctgacagcattccgctatggttttatagttgttttcgtttatcagcgtaccattggtgaaaagagatacattatgatccctcaatccctcaaggagctgtatggtgccggtatggatcagcggctctccgccggatacgacaatatccgtggagccgtttatcttctttatcctttcaacaacggccaaaatctcatcaaccttcaattcctgcttatccactataccagcagacacaaaacaatgagggcagcgcatattacagttgttggtcattgtaatgtgcacctttttctttatggactcaaccgggtcttcctcttcagaagtggcatcctcataaaactggcaatcctcaactttcgtcaaaaagtccgtaaatgcaagaacgcagtcatcctctgtatttccagggaatgctgcgtaatactcattcaaaccgtctattattgtattctctgaaagtatcttaaaaatctcgtactcctgatcatcgagtacaatccagttcggatattcaggagctatgacaatatgatagccatcaatatccttgcttacagtgttgtgaggaaaatccacttttgaattggcatcaaattctctactcatatattttcccgtatgtctaaaaagtcccgggaacttgtcccgggatcttctcggcttttagtatacccagattagcagtcttttctcttgtgagttgttctgcactgagatctctggcaatgaacacgaaccgagttttctttcttttccggaaccgtaatcgtttttacctgcttgaacatactttgcctcctattgtcatttttgtcttgaatcaacaatctttgcgcttgtgcgtcgtacggcactgcatacgctggccgacgacaatgacctgactcttgtttttacttggtaccacaatgtttttcagacctttgaacatcttttgcctcctatgcttttctaccatacaacactacgaaatacagtatagcaccaattctgtgattctgtcaacggtttcgcaaaataaaattttggcaaaaatatgttcaattttgccatatcaccataaaatagagcgttatcaatgtttgttgtggtcaagcttttttgtaacactatgacctaatttctgccacagggattatgtacccccgtagcgtgcctcataaggtgttttgtaattattataagaatgcggacgtacatgattatattgcacataagcaaattcttcgactgctgtgtagagttcatcctctgtacaataataatgctgatatataagatcatttttcaatgtattgaaatatctttccataggggcattatcatatggatatccagctttgctcatgctttgttcgataccaagctttccacagaatttcgtaaattcttttgatgtgtactgacttccttgatcggaatgcagcagaagtttactcaattctattcccggttgtgaatgaattgctttttcaagcgttcttttcgctaaatcagcggttattcttttatccgttatacttgcgataacacttctgtcatgaagatcaataatggtgcaattataacgcttgctaccatctgttaaaaatagataggtaaagtcagtacaccatttttgatttattgcatttgcatgaaaatcctgattcagcttgttttcataaaccttgtgagcaataccatgttcatacgccggtttcttttttctggatattgaaaacagctgcatttcagtattcatatatttgtgaaccgttaaacaactgatatcgtaccctttacgaataagataattataataagcatttggacatatattaaactttctgaggaaccatctcagtccaaatttattgttgaatttctgaatgaatcgataatcctctaatcgatttccttcgcaaagaatgccgccgtttttttaagaagtcgttttccttttggagttctgcaagctgtcttttcagtttaaggttctccttcatgaaatcataatcggcttgggcttcttcatttatctggcattcttcacgaaattgttttgtccagttggatatacttgcttttgatactccgtattcagctgcaagtccttttatggagcgtcccccctcaagatgaaggcggacaatcttcttcttgaattctggttcataatgttggttcatctgtaacatacctcgtttcctcctaagattatatcttattaggtcggtgtgttacaactatagtttagcacaacagtccacgcttgtatgaaccagccatccagcaatagggccgacttttggtgaacttgcatatttatataagctttcagcatcgttttcttcccacggacgcaaaataagtctttctgtttctaaaaccactatgaacctccaatgtctcgttttttatcccatttacttctttgtcttttcttccaactcaagcagatacctgtcatagtccgacatgaacaatctgtcttgaatgatacgatatttttcaaactccgtttctgcgtgtagtttggctatttcagcagaaacctttccggcatcctgcaaaatgccataatcaaacatttcaataaagctgttgagtctcttttcccaatcctccatagtaagaggaatacgccttaaggtcatgttttcagcaaaatccaaatatgccgttaccatacggttcaactgatgcaattcgttttcactgagataattctttgcaatcgttacatcactctttttaatcttgccatcgggagcatctgcccatgtagtaagtcccatatgctccttttggtggtcggctcgctctacaatcaattcagcaaccgtgtgaccgtgaaccgcaaaatgcattttgttctggacggtcgcataaaaccttttcgttgttgcagcggttttgtcatagtctatggcagtggcataaatatctgtgattttctgatagaactttctttcgcttgcacggatttctcggatgcgttctaactgctcatcaaaatacttgtccgtaagataagtacctcgtttcagacgctcatcatccataacccagcctttgatggtgtagtcctttacgataccgtttgcccacttacggaactgcacggcacgttcattgtttaccttgaagccgacagcaataatcatctgcaggttataatggttcacttctcgctgaacctgcctggaaccctcggtttgaactatccgaaattttcggatagttgccgactcttctaactcgctatctgaatatacttttttaatgtggtcactaattgtacgcacatcaacatcataaagcgtagccatcattttctgtgtcagccatatattttcatcttcgtagcgcatttcaatgctatcttcctgtcctccgacagaagcaacgtaggtaagatactctgctgcacttgaacgaatgcttatttcatttttcttctttgccaacgcaaactacctccgattgtttagattgtgtcaacagtggtgacactttttatacagagtcacaaattcgaactgaacattacaccttttttatcggatgtctaattacggttttccatttttccgcagcaacctttcttgcatctgacatataaatctcatgatgtaatctttcattattaatatcggtaacatacccattctgctctaagtaagcatccataagcgcaacagttgccggctcatcatcgaatgggcctaaatgcataatttgaacgcaaagtccttcatcgatagtgagaaattctgcagagaaacaatcaagttttttcttcttcgttgccgtttctaccgcccaatcaaaatccgctttagtaacaaaatcaggcaatcgaataacagaaatccagttgaaagcagatttatttgcataatccacaccatcaacatcatcttgccaccaaaagccttcaagcggcggaacaacatactcaaagaaaccctcgattttgtaatctgtcttatagctcatttttaatgtatatgcgacagcatacagcacactaatggcttgctgatatgctccaccttcttcatttggatttcccttacctctgacagcaatatagtttgcctttggaacatttactatctctggcttgttcttcggcatataaaattctttatattctttcttaaaatcaaaagccat

SEQ ID NO: 45 - DNA, 6697 bp, unidentified
  source 1..6697: mol_type = unassigned DNA
ctattttttctccagccccggccactcctggtctttctctgaaagtgtcagcaacgttccatccgtcatgcaatacccttccgccgatggggttccctgatactccccctgcacatccggccactggataccgattgccgggtcattccatgccaggccgccctcgtcgttcggatgccagaagtcattgactttatagcagaactctgcctcatcggacaggaccagaaagccatgcgcaaagccttccggaatcaaaaactgctttttgttttcctcggaaagttccactccgtaccattttccgtaggttgcggagccttcgcgaagatccactgccacatcaaatacgcttccgcgcacggcacggacaagtttgcactgcggatagttgatttgaaaatgcagtccgcgaagtacacccttgacggacatggactggttatcctgtacaaactggatatcgaatccggcttctttcatttccctctcattgtatgtctccatgaaatatccgcgggcatccccatgtacggccggtgtaatcacacacagcccttcgataccgccgacatttttttccactgttatctgtcccactgttttttcctctttcatgctgatttgtatctattcagaaccccctcagaatagttacgctgtttttaatatttcaccctgccctctgcgactgctttcaaatgctctccatacggactctttccgtagcgtgcggccgagtccatcagtttttcctttgtgatccaatgattgatatatgcaatttcttccggcgcggaaatggtcacaccctgacggtgctcgatcatctgcacaaatgccgccgcatccagaaggctgtccatcgttccggtgtccagccatgcaaacccacgtccgagcagctgcacatttaagtttttctgctgcagatacaggtcatttaaggtggtgatctccagttcgccgcgggcggatggctgtacctgttttgccattttgctcacgcctgccggatagaaatacagtccggtcacggcatagttgctctttggctgtgccggtttttcttcgatggatacggcttttccgttctcatcgaaatccacgacaccgaaacgctccggatcgttgacataatagccaaagacggttgcctgtccttcctgtgcatcctttgcggcatttcgcagaatttttccgaatccgtttccgtagaaaatgttgtctccgagcaccatggcacaggcatcctctccgataaattcctctccaagcaaaaatgcctgtgcgagtccatccggagacggctgcactttgtaggacagatgaagcccgaactgatttccatcccccaaaagtgcttcaaatctcggggtatcttccggcgtggaaataactaaaatatcgcggatgcctgccagcatcagtgtagacagcggataataaatcatcggtttgtcatataccggaagcaattgtttactggttaccatcgtcagcggatacagccgtgtccctgcgccgcctgccaatataattcccttcatcttaaagttccccctgtctctttaattcctgcagataccgccccagtgcgtcctgccaggttggaagcggtgtaaatccattttctttcagtttctttttttccagtctgctgttaaacggacgcgctgcctttgacagaccgtattccgcggttgtcacgggctgcacttcggtagaaatccctgcctgccggtaaatttcttttgtgaaatcgtaccaggatatgtaaccaccctcgtttgttacgtggtaataaccatatttttcggtttccatcatgtcaacaagcagtcttgccagatcgtaagtataggtcggtgtgccgatctggtcatttaccacgcgcacctgcgggtgattttttgccacttttaacatggtcttaataaaattttttccgtttaatccaaacacccatgcgatacgcacgatgaaatacttcccgagtgtctgtgctactgccagttccccgccaagtttcgtctgtccgtatacgttaagcggtgcgtatgctttgcagtccggctcccacggagtctcgccctgtccgtcaaacacatagtctgtgctgatatagaccattttggcatctgcttttttcgctgcgtccgcaatatgtttcgttccatctacgttgatggctctgacttttgcctgattttcttcgtcctctgctgcatccacagcggtccatgccgcacagtgcacgatggcatccggctgtacttgcatgattgtctgttccactgctgccgcatcggtgatgtccagcggcacatacgatgcacaggattccagtgtcggtgcaatatccgaaccgactgcctgatgtccgcgctttgtcagttcgtttaccacgtcatgtcccagctgtccggcaacgcctgtcacgaatactttcatatttatatgcctttctttatatcccttttttcccatacatttctttatagtaattttgatactctccgtttacgatgttctcccaccattccttattgtccagataccattggatggtcatgcggataccatctttaaacatcgtctccggcagccagcccagctcgttgtgaatcttggtcggatcgatggcatagcgcatgtcatgtcccttgcgatcctgtacgtgctcgatcaggctctccggcttgccgagatattcacagatgagttttacgatatcaatatttttcatctcattgtgtccgccgatgttgtagacttctccgacggttccgttgcgcaggatcaggtcaatcgccttacagtgatcctcgacatacagccagtcgcgcacattgagtccctctccgtataccggaagcggcttatctgccagcgcatttgcaatcataagcggaatgagtttttccgggaactggtatgggccgtagttgttggaacagcggctgatcgtcaccggcaggccgtacgttctgtgatatgccataacaagcagatccgcagatgccttggaagtgctgtaaggactggaggtgtggatcggtgtatcctcatggaagaacagatccggacggtccagtggcagatctccgtatacctcatccgtggatacctgatgataccgtgaaataccatacttcctgcatgcgtccatcagcacggaagtaccgataatattggtctgcaaaaagacttccggattctcaatggagcggtccacatgggactccgctgcaaaattgacgatcacatccggtttttcttcctcaaaaagggtatatactcccggacggtcgcagatatcgagttttacgaaacgaaaattcggctgatccatcaccggtgcaagcgtggacagattgcccgcataggtcagggaatccagacaaacaatgcgatcctgcggatgttcctttaacatatagaaaataaagttgctgccgatgaaaccggcaccgcccgttacaataatggtcatgagcatttcctcctgtgtgcatttacgatttctatatttatttccattataaaaggtgacgctaggtcaccttcaagtcttttttatagatttttctaattattttctgcacaggaagattccggcatcttttgtgatatgaaatccatctgccacgcgggcagaaacaaattcccggaactctttgtactggttcaaaagcagctggttctgatttccgtgacaggaaagaatataggaaatcagcggttctgcttccgctatttcaatcgcatcctcgtatcttcgcatctgaatttccgaaaaatacggtgctaacaggttttctccgttttcaagcccgaaccgctcatacagcacctccgctgacaaaacgatttctttatggaactgctgcaccagatcggtaatttcccgcatatgctgctttccgtaggtactgcatagaaaccgtcccccattttttaagactctccgacattctgcaagcacctgtgggatatcttcacagtaaaacagcacatgatccgcgatcacaagatcaaacatttcctcctcgtaaggaatttttccgcagtcaaattttttataggaaaaacggctgtcctctcccagtgcacgccgggcatcctttagcattccttctgatttgtccgagagaacgacccatagatccgcaggcagctgttctctgttttcagtccataatgctccatttccacagccgagctccagaatccgcatccccggctgcagattacactgctgcataatccacggaaaccacccctgcggattgacggaatactccctgtgcaggcgaatccgggcggaaatatttgccgcattctggtactggtttttcaggcttcgttctactgccgtcaaatggatcagatccagcatactgttccagtcaatcgcctgttccgtctggctggcttctatggtgcggtcaattgcctcatccatcgcctgcatttcgtccattttctgccgcagcagcttcttctgtatccgcatggattcaagaagatactgctgatctgccgcagcaagtgtcatctcccggatatcttccagcgaaaatcccagatattttaataaaaggatctgctggagttttgccagatctgcatccgtatacagccgcgctcctgcggcagtccgtgcacttggttttaaaatattctgtttatcataataccgaatcgcgcgaagtgtcacatgtgctttttttgcaaattgtccggatgtgtaatacgcatcctttttcatctacagttctttcacctcatcccgcatttcttctgtcatattctgtacataggtcgtctgggaagtaatttcttccgtgtttgcggcaatcgttgacaccttctgcgtcatggtattcatgctttctaccagatctttgatcgaatccatgctctgtgtaatctttggaagaattgcctcggctttctggtcgttctgtgtcagaagatccttcgtggaatcagacagtgtacggatttcctccgctaccaccgcaaagcctcttccgttctcaccggcacgcgccgcctcaatggaggcattgagtgaaagcagatttgtctgtcctgcaatggcagaaatatcttcattgctctttttatatacactgatgaaatccgacataatgcggatggattcattcagttcatcgcacaggcgggaaatatcctgaatatactgcgcaagattagtcgcttcatttgcagactcctcatttgccgtattcaattctgcaatgttatcactcagggtaataaaccggtctgtgatatctgtaatcttctgctggcggatttcctgttccgtccgctcctgattacgaagttctgcaatcttttttgtctcttcctctgccatgccccgcacatagtgcacacagttttcttttacgttgactccattgtggatggcacgtaccatgttggtgcagcttgaatatccacaggattcgcagtccctgtgctgttcctcataggtatcttttttcatttctgcaaacaggcggttcttctcctgttcggacggttcctcaatatgtactgcgcgattggtgtagctgcgcataaaatcgttgatgtccagctttccaaaagcgtccatgaagtttttcagacgttcctccggtgtcagtgtatctgcccacggactcctgcttttgctcttcctgccaaagtgtgccttctcctgttttgcactggttttgctgttccgcagttttgcgattgtcagcatgacatcatccgttccccgtttcggatctgtggcagttccgtagagacagcccttcgcacagtttaaaatgtctaccataaatggaagttctttgttctgctgaatgcgctgtgcataggaacgcagatattcataggcctcatgctcgccctctacctgacgcactacctgctctttcccaagaaaatgttctacattctcccgcagtccaccaggcatcggatacaaagaacccagtccgtattccagttcatcggtatatggttcacatccttcataatcgtttccgatatacttcatcatcttttcaaaagttacattataagaaacatatccgccgcaattgggatcggtaatctctaattttttggcaatacacggactgataaaagcgatttcatctgtgacctgcatgtattttttcatataaatagcagtacacatcatcggactgtgtaccggcatcagacgcggaatcagctccggtatatatttttccacataggtgactactgccggacacggctgggaaatgcccccgaaaaatttgtgttccataatgtatttcagatatccccaggttgtgatatccgcaccgaacgatacactgcagatatggttgactcccttactctttaaatagcccagcacacgctggtattctttgggataatttgccagaaatgccggtgccagtatcacggaaattttctttcccgatgcaaggtcttcaaagaagcggtccgtatcatcataatagtctctcgcttcatgtgggcagacatcaaagcattccccacatgcaatacatttgtccgggtctaccgttacataaccttcctgcgttgcaatatttgccgtaagtacaggacagccccgcacgcatttgttgcatccggtgcataaatcatttgtgtaaatcagttccat

SEQ ID NO: 46 - DNA, 11524 bp, unidentified
  source 1..11524: mol_type = unassigned DNA
atgaaaaaaggacataaatacggcacacaccgggtaatctccccgaagggcgtgcttccccagccggcagacaagctggacaacaacatggacgagatctacgacaacgagattctgatcgacgtacagaccctcaacatcgactcggccagcttcacccagatctcgaaccaggccggaggcgacaaagccaaaatcgccgagatcatgctcgacatcgtcgaaaaacaaggcaaacaccgcaatccggtaaccggatcgggcggcatgctgctgggcacggtcgagaagatcggcgacgcgctcgtcggcaagaccgacctcaaggtaggcgacaagatcgccacgctggtttcgctgtcgctgactccgctgcggatcgacaagatcaaggagattcgccccgatgtcgatcaggtcgatatcgacggcaaggcgatcctgttcgaaagcggcatctacgccaaaataccttccgacctgcccgaaaagctggtaatgtcggccctcgacgtggccggagctccggcacaggtagccaaactggttcgccccggcaacacggtgctgatcatcggcgcagccggcaaatccggcatgctctgctgctacgaggctcgcaagcgggtcggcgtaacgggcaaagtgatcggactctgttacagtcccgaggagaaggagcgcctggacaagctgggcttctgccacgaggtcgtctgcatggacgctcgtcagccgattccggtactcgaaaagattacggagctgaccaatggcgaaatgtgcgacatcaccatcaacaacgtgaatgttcccgacaccgaaatgaccagcatcctctgtaccaagaacacgggcatcgtctatttcttctcgatggccacgagcttcacgaaagccgctctcggcgccgaaggcgtcggcagcgacgtgacgatgattatcggaaacggctatacgaagggacatgcggagatcacgcttcaggagttccgcgaatgcgaagccttgagaaagatattcaccgagctgtacgcctaaccgatacgaacgacacctgccgcccttcctcatcgtccccgccggcgcaaattaaaaaagcaggacggatccgacttaccgaggcagggaggcactcatcgaaaatagccgtccgccgcatccgttttcgatgagcggacggcgaaaacaaacgctcgctacatcggcgaaaaaacacaaatcacaacaacgtaacaaccgaacgaaacaaataaaatcaaatgacacctctcacacccgcaatgagccgcagaaaagaattctttcccgaagtgaccgaccagcaatggaacgattggcactggcaggtaaaaaacaggattgagaccgtagatgagctcaagaaatacatcaagctgaccgctgaagaggaggaaggcatccgtgaatcgctcaaaacgctccgcatggccatcacgccctactacctgacgctgatcgatccggaaaatccgcactgcccgatccgcaagcaggccattcctaccgtcgaggagctgaagcgctcgcccgccgacctggaagatcccctgcatgaggacagcgactcgcccgtaccgggtctgacgcaccgctaccccgaccgggtactgttcctgattaccgacatgtgctcgatgtactgccgtcactgcacgcgccgccgcttcgccggccagcacgactgtgcaacccccgagaaacagatcgacgactgcatcgactacatcgcccgtacaccgcaggtacgcgacgtgctgctctcgggcggcgacgccctgctggtgagcgacgaaaaactcgaatatatcatcagccgtctgcgtgccattccccacgtggagatcatccgcatcggctcgcgcaccccggtcgtgctgcctcaacgcatcacaccggaattggtgaacatgctcaagaaataccacccgatctggctgaacacccacttcaatcatccgaacgaagtgacccccgaatcgaagcaggcctgcgcacgtctggccgacgccggtattcccctgggcaaccagtcggtgttgctgcgcggtgtgaacgactgcacgcacatcatgaaaaagctcgtgcacgaactggtgaagatgcgtgtgcgtccctactatatttatatctgcgacctgtcgctgggcatcggacacttccgcactccggtatcgaaaggcatcgaaatcatcgagaacctccggggacacacctcgggttacgccgttccgacattcgtcgtggacgctccgggcggtggtggcaagattcctgtcatgccgaactatgtcatctcgcaggctccgaaccgcgtggtactccgcaactacgaaggtgtgatcacgacctatacggaaccgaccgactacaaggacgaatgccactgcgaagagtgcgagaaagcacgtcggaaggaaggcgtggccgagttgttgagcggcggacgtctttcgctcgagccgtccgaattgagccgcaagacccgtaaccacaaccattagaacgtaacgctgcaagaccagcccgcaccggattgggattcgtaacgaacatatcggatttcggcagcctggccatcgtcggtctggagaagaacacgggtaaaaccgaatgtctgaactacattctgggacaactcggtggtcaggcggaccgtttcgccctgacttcggtcggaatcgacggcgagagccgggatcaggtgtgccagacggcgaagcccgagatcgagattcccgagggaatgatcttcgtcacctcggagaaacactaccgggaaaaacggctcgcggccgaggtcctcgacgtgagtctggagcggacggcgctcgggcggctgataacggcccgcgcgaggatgagcggcaaattgctgctctccggaccttcggacacggcgggcctgaaagccctgatcgaccggctcaaagcccggggcgtaggcacgacgatcgtggacggcgccctgtcgcggttgagcctggcttcgccggcggtcaccgaagcgatgatcctggccacgggagctgccgtcgcgggaaatattcccgaactggtccgcaagacgaaatacgtttacgaactgatcggaatcgaagagatagaggaggcgctgcgtacccggctcgatcctctgacacagggggtgtgggccgtcagcgacggcggcgaaccgatcgacctcgaattaccctcggtgctgatgctcgaacggagcggagagaacctgttccggcacggccggcggatttacgccatcggcatcgtcacggacaagctgttccaactgctgcgaacgcaacaacgggaagtggagttgatcgtccgcgactttacgcgggtgttcgcctcgcccgaagcgttttacgccttcctgcgccggggacaccggatcagggtggtacaccgcagccggctgctggccgtcacggtcaatccgacggctccgtcggggctggtgctcgactcccgacggttgtgcgaagcgatgcaggaggcgttgcaaataccggtttacgacgtaaagaaaatgcccgaataggaacgaatacggctcccacgaacagaatcgaggatcttaaaatcccctccgaggaggggagtcaaaggaaggtcagacgctctgacacggcagaaggccgtgaaataaatacgcgaaaccgtgcaaaattgcatcgaataaccagaaaacgaatgcgactcaaagaggccatacaacataccagcggactgcgctgcgtcgtcgaaggaatggagatctgttcctccgtcgggcgacgtatgctccatgaaatgacatggctcgacaaggagtcggcgatcacggaggaacacgaccgtatcgcctcggtgctgcgcctgctcgaaaccgaagagggacgcgaccgcaccgaaacgattcgccgcaaactggccctgctgcgcgacatccgctcaacgatcgaacgcacgggcggcaactgcgtattcgacgacatcgaactgttcgaattgaagtttttcgcgctgctggcggaagagcttcgaccactggcttcgcaagggcatcttgcggaacttcccgagctgaacggggtcgtcgatctgctcgatccggaaggcaaccggctcccccatttcttcgtctatgacgcctactcggaggagctgacgaccctgcgcaaacagatcaaagcacgcaaacaggccggagccgacgagtctcaagtgcaggagctctatttccgcagcgtggaaatcgaagaccgcattcgggagagactctccgtcgaattgcggaaataccacgaagcgttgcaacaggcactcgaccggatgggatggctcgatgtggtgatcgccaaggcgatgcaggcccgcgactggggccttacccgtcccgcgataacgcaggacacgacctccttccgaggcttgttcaaccccgagttgcggatttcgctcgaagcggccgggaagcgattccagcccgtgaacatccgcctgacgacgggacctacggtaatcaccggcgccaacatgtcgggcaaaaccgtgttgctgcacagcgtcgagctggcccagtacatgctgcaattcggattttacattgcggccgaaagggcggaaatagcccttgtggacgaagtgcactgctccgtcggcgacggacaggatcaattgagcggcctttcgtccttcgcggccgagatgatgcggatggacgaactggccaaaagcgtccgggcaggcaggcgggtgctggctctcatcgacgaaccggcccgcacgaccaatccggtcgaaggaagggcgatcgtgaacggtgtcctcgaatttctggccgactacgaagtcccttcgctcgtgaccacccactacaacggcatcgcggctccgtgctgcaagctgaaggtaaaaggcttctcggaaacgaacgcggaggagaagatcacgctgaaaaacatcaacgatttcatagactactcgctcgaggaggtcacgacggacgaagttccgcacgaagcgatccggatcgcccgtattctgggcatcgacccggagatcctccggcgaatcgaacgcaacgaagaactcaaaaacaaccaatgacggcagccgtacggcacagcctacatgaacgatatgaaaagcaaattaggaatagactttaaccaggtggaacacgcccggagcgtagcgcgcaagatcgccgacggggtgcaggattttgtggaaggttatacgacggtagccgtcgagcgaacgctgtgccgtctgatcggcatcgacggcgtggatgccaacgcggtaccgctgccgaacgtggtggtggaagagctgcgggagaaaaacgtattgggcgaaggcgccctgttcttcctcggcaacgcgatcgtcgaaacgggactcacaccccagcaaatcgccgaagagatcgctgccggcaaactcgacatcacccgctcggccgtatgtacggcagccgagcgcgaagcggcgctgaaaccgtatatcgacgccagcatcgccaaaatcgcagccaaccgccagcgtcgagaaaactacatcgccaccatcggcgaagggccgcgcccctacctctacgtaatcgtagcgacgggtaacatctacgaagatgtcgtacaggcgcaggccgcagcccgacagggcgccgacatcatcgccgtaatccgcactacgggccaaagtctgctcgactacgtgccctacggcgcgacgaccgagggattcggcggcacgttcgccacgcaggagaacttccggatcatgcgcaaggctctggacgaagtaggcgaagaggtcggccgctacatccgcctttgcaactactgctcgggactctgcatgcccgagatcgccgtaatgggtgcactcgaaggtctggatgtgatgctcaacgacgccctgtacggcattctgttccgcgacatcaacatgcagcgcacgctggtcgatcaatatatgtcgcgcgtaatcaacggcttcgccggcgtaatcatcaacacgggcgaggacaactacctcaccacggccgacgcggtcgaggaagcccacacggtgctggcttccgacctgatcaacgaacaactggccctgctggccggcctgcccgaggagcaaatgggtctgggacacgccttcgagatggatccgatgctcgaaaacggcttcctctacgagctggcgcaggcgcagatgacccgcgagatcttccccaaggctccgctgaaatacatgccgccgacgaagttcatgaccggcaacatcttccggggacatatccaggacgcactgttcaacatggtgggcatctggacttcgcagggcatccagttgttaggtatgccgaccgaagccatccacaccccgttcatgtcggaccgctacctttccatcgagaacgcccgctacatcttcaacaacatgaagaacatcggcgacgaagtggagttcaaggaaggcggactgatccgcaaacgtgccaaggaggtgttggacaaagctaccgcactgctcgaacgcctcgaaaaagagggactcttctcggcgctcgagaagggaatcttcgccgacatcaaacgccccatgaacggcggcaagggtctggagggcgtgagcagcaagggccgcaactactacaaccccttcgtggagattatgaaaaacggcagtcgcgccgcagcgaaaaaatgatattccgatgctgcaagcacgaccaaacgccttattttaactatattagcatattgattctatgagtggaggattatattcaaccgaaggcagggatttcgaccagaccctcgacctgaaaaagataaagccctacggcgacacgatgaacgacggcaaaacgcagttgagtttcacactgcccgtgcccgccggcgacgaagccatcgaagcggccaaacagttgatgaaaaagatgggcttcgagaacccgcaggtggtattccaccgggagctgacggccggttacacgttcttcaactgctacggaagctgtacccatacggtcgattattcgaatatccatgtcccgaaagtcgaatcgaccaaatgggacatggccgaaacggacagcttcatccgcgagcagatcggccgcccgatcgtggtgatcggcgccagcaccggcacggacgcccatacggtaggtatcgacgccattatgaacatgaaaggcttcgcaggtcactacggactggagcgctacgagatgttcgaagccctcaacatgggcagccaggtaaccaacgaagagttcatcgccaaagcgatcgaactcaaggccgacgccctgctggtttcgcagacggtgacccagaaggacattcatatcaagaacctcacggagctggtcgaaatgctcgaagccgaagggctgcgcgacaaagtgattctggcgtgcggcggcccgcgcatctcgcacgaactggccaaagagctgggctatgacgccggcttcggcatgaacacctacgccgacgacgtggcgtcgttcatcgcccaggagatggcccgcagaatgcaccgcaaataggaaacggtcccggattccagaaccgccccgtttcaagacagtacgacgaacagacaaaaacgacataaatctatggaaaaggaacagatcagagaaatcatcgccaaacgcgtggcgatggaactcaaagacggcgacgtggtgaacctcggtatcggactgccgacggccgtccccgattacctgccggaaggcgttcaaatcttcctgcagagcgaaaacggcctgctcggtatgggcccgacccccgcaccgggcgaggaagaccccgaatttatcaatgccggcggcggattcgtcacggccctcgagggcgcctcgtgcttcgacagcgccacctcgttcggcatcatccgcggcggtcatgtgaacgcttcggtactgggagccttgcaggtcgatgaaaaaggcgacctggccaactggatcatcccgggcaagaaagctcccggcatgggcggtgcgatggacctgctcacgggtgccgacaaggtgatccttgccatggagcacacggccaaaggcgcacccaaaatcctcaagaaatgtacgctgccgctgacggccaaaggctccgtgaacatgatcgtaaccgaaatgggcgtcatggagattaccccggaaggcatcgtgctgacggaaatcaaccccgaattcaccgtcgaacaggttcaggccgctaccgaagcgcacctgatcgtgtccaaggatcttaaacccatgaaaaaataggcccgccatgatcaaaacaggagataaataccgtcacgaagtgacctatacgcaggaaggcgtgatcgctttcgccgaaatcacgggcgacaaaaacccgatccacctcgatccggaattcgcagccaaaaccccgttcggccgtcccatcgtgcacggattcctttcggcctccgtattctcgaaggtcttcggaatgctcttcccgggacagggcaccatctatctctcgcaggagatgtcgttccgtgcacccgtcttcgccggggagaaatatacagccgaattcgaagtaatcgacgtaaacaccgaaaaacacatcggtacaatcaaatgcctgctgctcgatgctgccggcaaagagtgcatcacgggcaccgccaaactcaaacacaacaaagaattcatctaaaaagagataaccatgaaaagacttgagaacagagtcgccatcgtcacgggcggcacagccggtatcggcgaggcaacggcactgcgtttcgcacgcgaaggcgcacaggtagtcgtatgggcacgtaacgaagcccgcggtaaggaaatggagaaaaaagccgcagccgaagggctcgccatcaccttcgacaaggtcgatacgagcgatttcgaggcggtaaccgctgcggccaagcgcgtcgccgacaagttcggcaagatcgacatcctgatcaacaatgccggcatcaccaacgacagcacgctcaagaaaatgaccgtcgaacagtggcagaacgtgatcgacgtcaatctttcgggcacgttctactgctgcaaggccgtgttgaactacatgctcgaagccggctacggacgcatcgtcaatgcctcgtcggtagtagggctttacggcaacttcggccagaccaactacgtggccacgaaagccggcctgatcggtatgaccaaaacgatggcccgcgaactgggacgtaagggtatcacggtcaatgccgtagccccgggcttcatcgaaaccgaaatggttgccaagatgcctgagaacgtactcgacggcatgcgggccaaagttcccgtaggtcgcctgggtcgtcccgaggagatcgccgccgcctatctctacctcgcatccgacgaagcggcctacgtcaatggtgccgttttgagcgtagatggcggtatgactgtttaaaatcattaaaaaaccatacttataaaatgaatttcgaattgaccaaaaccgagcagctgttccggcaaatgatccgcgaatttgccgaaaacgaggtgaaacctctggctgccgaaatcgacgaagaggagcgtttccctgtggaaaccgtagagaaaatggcaaaactgggaatcttcggtattcccttccccgtcaactacggcggtgcaggcggcaacaacatcctttattcgatggccgtcgaagagctgtcgcgcgtatgcgccactacgggcgtggtcgtatcggcacacacgtcgctctgcgccgctccgatttatgagcacggtaccgaagaacagaaaatgaaatacctgcccaagctctgctcgggcgaatggctcggcgctttcggccttacggagcccaacgccggtacggatgctgcggcacagcagaccacggcagtcgatgcaggcgaccactatatcctgaacggcaacaaaatcttcatcaccaacgccgcttacgcacacgtttatatcgtgatggcgatgaccgacaagtcgcagggtacgcgcggtatctcagcattcatcgtcgagcgcgacttccccggtttctcgatcggcaagaaagagaagaagatgggtatccgcggttcggcgacctgcgagctgattttcgagaactgcatcgttcccaaggagaatctgctcggcaaggtcggcaagggcttcagcatcgctatgaagaccctcgatggcggccgtgtcggtatcgcttcgcaagccctcggcatcgcacagggggcgatggacgaaaccgtgaaatacgtcaaggagcgcaaacagttcggacggacgatcggacagttccagaacacccagttccaactggcagacctggataccaaaatcgaagctgcccgcctgctggtacgtgccgcagccttcaagaaagaccagaagctcccgttctcggtcgatgccgcccgggccaagctctttgcagcggaaaccgcaatggaagtgacgaccaaggccgtgcaattccacggcggatacggctacacgcgcgaataccccgttgagcgcatgatgcgcgatgccaagatcaccgagatttacgaaggtacttccgaagtacagcggatggtgatttcgtcggcactgttgaaatagcggcgggcgaccgtgcatccggttccggaataaaccccgaagccggtcgtactcccctcgcaaggacacataaggtaaaaacaataaaaaacagatattcgaatgaaaattgtagtttgtataaaacaggttcccgatacgacggaaatccgcctcgatcccgttacgggaacgctgatccgcgacggtgtgcccagcatcatgaaccccgacgacaaggcgggactcgaaatggctctggagctgaaagaccagtacggcgcacacgtcaccgttatcacgatgggtcctccgcaggccgacgacatcctgcgcgaagccttcgcaatgggtgccgaccgtgcgattcatctgagcgaccgcaaattcgccggtgccgatacgctggcgacttcgaacgctatcgccggtgctctccgcatgctggagttcgacctggtaattaccggtcgtcaggctatcgacggcgacacggcccaggtaggcccgcagatcgccgaacacctcggtctgccgcaggtgacctacctcgaaggcattaaatacgaaggaggaaaccggctcgtcgtcaagaaatggacggaagaggggtatcagttgctcgaggtggaaaccccgtgcgtggtaaccgtactctcttcggccaaccggccccgttatatgtcggtacgcggcatcgtggaggcatacgacaagcaggtggaagtctggggtttcgacaacatctccgtcgaagagtcgaaactcggtcttgccggttcgccgacccgcgtcttcaaatccttcacgaagggtgcgaaatccgcaggtaaggtcttcgagctggagccggccgaagcagccgatctgatcgtcgagaagttgcaagaaaaattcataatctga

SEQ ID NO: 47 - DNA, 13527 bp, unidentified
  source 1..13527: mol_type = unassigned DNA
ctattgatggatgtaatccagaatctgctctgcatgaatcttggtcttgatctctttaggagtgaagattttctcgatgacgccttcttcgttgacgagataggtggtgcggaggatgccgatggtctttctgccacaggttaccttctcgccccagcagccgagttcctgcagtaaggtggtttcggtatctgcgataagagggaactgcaaacccttggtttcggcaaacttcttctgcagagcctgcttgtccttgctcacgccgataatctcgtaaccggctgctgccagctcctccttatgtgcttgcagggagcaggcttcggcagtgcatccgctggtgttagccttcggataactgtagagcactatcttgcgaccacggtagtcgcttgcctttatctcacgtccgtcctggtcaatgccaagaatctctggtattttatctcctatattcataattctatatttattaattatatgtcttgttatgatgcaaagataataaaaataatgcgaaccgatgtgattcttatgatttttaacacaaataatcgttgtttatctttctacctggaagtttaaacgaatctttcttttggataaaaaaaagaaaaatatagggatgatatttggtaatatgctgatatttacttacttttgtgtgatgaacgttcatggtatgaaacagggagcgtgatactaaacaggtaaaaaaggaagaaaatgaagaagatatttttgtttatattattctgtctttccgtatgcagcatgtcggcttacgactttctgcgagctgtgaaagatgagattccgggaggttacaacttctgggtttatacgccagtagattatttttattcgcaagagcagacaccggtcatcatctttctgcatggagccagtctttgtggaagaaatctgaataaggtgagaagatacggaccgcttgatgccatcgtcaaggggcgcgatatcgatgcgctgaccatcgttccgcagaatccgggaggagcttggaatccgaagaaaatcatggatatgctagactgggtgaagaagaattacccatgcgattctaatagggtttatgtcttgggcatgagtttgggcggttatggcaccatggatgtctgtgctacttatcccgataggatagctgccggcatggcgctgtgtggcggctgttcgtataaggatgtgagtggattgggcgatttgcctttctggattatccatggcacagcagatagggcagtaccggtcaagcaatcgaaggtggtggtagataaacttgtgaaggatggcaaggatacccgattgatatacgactggtggaagggtgccaatcacggtacccctgctcgcgtgttttatttgaagaaaacctatcagtggctcttctcgcacagtctattaaataaagatagacccgtgaaccgcaacatcagtattacgatgagtgatctgggcagagcatatggtgatgtaaaccgaaatgcccctcagcctgaactcatcgatggtccgagtgtgatcaagcaagagggaaatgaatattaaggaatcttttataataagatgttctgccatgatgtctttttatttgattaaatccctttatgcgaatgatttttatgccttgcaaagatactgttttttctaaaattagggacttagaatgggttaaatcttctaaaattaggggctaagaataggttagcctgacttaaacaagatatttttcaggtctttttctatgttatctggcgtttttttattaattttgcaatcgaaatcataaaaacaaactataatgaatacaaaaactattttaatggctatgacttgcctttgtgcattcaacagccttcagggaaatgctcaggtagcaggagggaatactttggttgctactgccattgagcagcgaagagtcactcttcgtgacagtatcttgaaccatatttctggtgcaaagattgcagcgaaatcattacagattaagaactttggagccaagaacgatggtaagaccgattgtcgcgcagcttttgccaaggccatcaagaaggcttcggcgatgaagggtgccaagattgtggtgcctgcgggtacctattatattaagggacctatcgtactggcaagcaatatctgtctggaactgcagaagggagctaccctgaagtttgcgccagaagagaagtactatcctatcgttaataccagttgggagggaactttcctctacaactattctcctctcatctatgcctatggctgtaagaatgtttctatcattggcgagggaaccatcgacggcaacgccatgactacctttgccaagtggaagcctaatcagaagaaagcgcagcagttgagccgcaagatgaatcacgaggaagtgcctgtaagtgagcgcaagtttggagatggctactggcttcgtcctcagctcgttcagctctacaactgccagggaataaccctggaaggcgtgaagatcaccaattctccattctggtgcatccatctcttgaagagtgagaatatcatctgtcgtaatttgcgatatgatgccaagcttatcaataacgacggtcttgatccagagtgttcccgaaacatcctgatagagggcattgcttttaataatggtgacgacaacgtggcaattaagagtggacgtgacaatgatggctggaatgccaagatgccatcagagaacatcatcatccgcaactgtcatttcaagggcttgcatgcggtggttatcggtagcgaaatgtcttcgggagtaagaaacgtcatcgtagagaactgcgattatgctggttattgcaagcgtggcatctttatcaagaccaatcctgatcgtggcggttttgtggagaatgtatttgtaaaaaactgtacgtttggtgatgtggaggatctcttctacgtaaccagccgttatgcaggtgagggacagacaaaccatcatttctctaccgtgaagaatatcttcgtggatggtttgaagtgtaacaacgtgagtgctgcagccttggttttgcagggtacagaggctaagcctgttactaatgtttcattcgacaagattgaagtaaaaaatgctaagacaggcatcagcttcgagaatgtgctgggtgtgaacatgggtgaatgcagcataggcggcaaggtgggaactcctacccaggatactccaaaggataaagttttcgaaagaaataacaagtaagttatttgtttttcaatctttttttgtacttttgcatcatcaatttaaatgaagaaaatccagttttttaaaggaagtaagaaaatggctgataaagatatgaaatggaagacgctctcgcagaagtatctgatagagaagccttggctcacggcacgagtggataaggtggaattgcctacgggagccattatcgatgaatattacgtgctggaatatcctgattgggtgaacaccatcgccattacgaaggacggaatgttcgtatttgtgcgccagtatcgctatgcgataggtaagacggtgaatgaactctgcgcaggagtgatagagaagggcgaggacccgatggttgctgccaagcgagagctgatggaagaaactgggttcggtggcggaaactggcagaagtggatgacgatttcggctaatccgagcactcataccaatcttacccattgctatctggctacggatgtggagcgcatggatgttcagcatcttgaccaggctgaggatatcgagattcgcctcctctccagggatgaagtgatggatatgctggagaagggagaaatctggcaaagcctgatggcggctccgctctggaagtattttgcgaaagcaaagtaagctgcagggcttcatttataaaagccaagtaaatattagacattaaacaataaacattataaagatggtaatagatttcgaaaagattgctgaggctcacttggagggcttcaagggtggacagggtaaactcgatactcgtaactatgtggatgacaaggtgaagattatgtattctaccttgcgtccgggtgcatcaactggtcttcatactcacgagggcaactgcgagattatctatgtggtaagcggcactgctactttccattatgatgatgccgtagaagaggttcgacagggacaggtgcattattgtcctatgaaccatgctcattatatggagaatctcaccgaccatgatctggtgtatctcgccattgtgcctgagcatcattaatatcccttattagggaaaatcacatcatatttctcctgaggaaaatgaaaaaagaaagtccaactcggatgcctctcttataaaaaggctccaagctggactttcgtcattcttatctctctcttttatgttgctatgctaatctttgtttatctaaaagccaactggcgggttagagtttttcacagaactcgattttctccttgtttggcccctcgatggtgaagaactttacgccgttttcccagaaaggaagaccatttacctgctgatccagcaacttgaaggttcctgcttccttcactaccaggaagagatcctctatgttctttacatcgatggcgatgtggtcgatggctccatattccatctttgcctgatggttctgataggtctcgatgatgagattgtggagctggaggaaggctacttcctcggtgccgtttactgtgcggagggctgtctcaaagcccagggcatgataaaactcaatggtcttgttgatgtcgttggtaggaatgccaatgtgctgcacgcctgttgtaaaatctttgatcttcataatgaatctgtgtttagatgattgttatgataaaacttttttgtgtattgaagatttagaagcggatgatttctgctccaatctggaaatagctctcgttgctctgaggattccacatgcccttggcataaaccggaacggtgtagttgccgagcttgaggtcgtgggaggcttgcagcgatacgtgtacgatgcctgccgtggttccaaagaagtgggcatcctcgccagctctgttcagggcgaaggctccaccaactcctgcatctaccttccagccatccttctggtagatagggtattccgcataggcgaaggtggaatatttctgcttcgtattgtcgctgttgcggtcgcgtccgaagactaccgttgaccagctcaagagcagtggaaacttctcgtcctgaaaccggtagcttaatgtagcatcgaggaatcggccggtggtatgagcagagtagttccagtattccttattattataggtggcgccaggggagaagttgtaggtgtcccacagggcgaatccccatccgccagccttcagattcagataatgattaaactccttgtaggagccttccgagttgcagccaccccaaagtcccacggtaacgtggtcattggccatcgtatagctcaggtcggtgaggaggacgatgccgtcggaaacttccatgccacgccacagatgattgttctgcacgttggctttcagatggagctgtgcctgggcatttcccaggcaagcagccatcatcaaaacaataactacaattcttttcatggttttactacaaaataaactttttgaacctaactaactatgaaccttatatacgttaactaattacttaaaccatatattaaagataaatataatttgcatataatttgggcaaataagggcttatcttgtaaattccttaggcaagaccggcatggctccgttctgggtacagacgaatgccgaaacctttactgccaattcatgagcttcctttacgctcttacccttcaggatgcttgccacgaatgcgcctgtgaatgaatcaccggcacccactgtgtctgccacttccactttcggtgtctcgataaaagaaacctcgccaggggtgaatacatagctgccgtttacgccgcaggtaagaatgagcatcttcagattgtacttgcccaagaggagccagcatttattctccaagtcgatgcccggatagccgaagatgcggcttacggtgatcaattcctcgtcgttgattttgaggatgttacatcgcttgatgctctcggtgataatctccttggtatagaagccttgacggagattgatatcgaagattttgaggattccttctccctcaggcatgtggtcgaggaagcggtagatagtgttacgggaaacctcgttgcgctgagccagtgaaccgaagcaggctgcggtgcagttctttgccaacttctccagggttggcgtgtaggggatgttgtcccaggctgctccctccttgatgtcgtagcaaggaatgccgttggcatcgagtgaaacctggacggtgcctgtagggtaggctaccttgtctatctgatagttgagatggtgatcgttgagttccttctccagttccttgcccaactcatcaccgcccattgcgctgaccgcacagctattgagtccgaactgcgaaacgtggtaagcaaagttggctggtgcgccacctagcttctttccttctggaagcacatcgaagagtgcctcaccgatacctatcactgattgtttcttttccattgtcatttttactttaagaatgttagagatgttatttgatttctgttgcaaaggtagcatttttcagctaccttcacaaagaaaaatcatctaaactttctgcaaacgttcccgcaatcgtttccaatttctgcaatcgtttgcagtatgtttcttctcttctatctttttacttcttctctccaggtttctgttcgaaatcgatgagaaccttcatgctggtttcgcgatgagtgtcgataaacttgtaggcatcatcgtattcttcgaaggcaaaacggttgcttacgagtggcttgaggttgacgatgcccttgcttacgtaatctatggctgtgagataatcttcgtggcgatacatcattgaaccgatgagtctcaactcatgctcgcccagatagaacatgctgagggctgggtccttggcaaagactgccacaaccacgatgtcgctacctttctcgatggtctccatcagcgaacggatggaaacttctacacctgctacctcgaaacctacctgatagccttcctcaccgaaaagttcctgggctgcctccttcaaggtcttcttggtgatgttgagggtgtgcttgatgccgcattcgcgagccttagccaggcggaggtcgcttacatcggtaatgagtacattcttggcgccacgagcaatgcagaactgggctatgaggttgccgatggttcctgcaccgctcacaactacattcttacccttcacatcggtgcggttgctggcatgggcaccaacggctgaaggctcaatcatggcaccgtagtcaaggctcatgccttccggcaacttagccacgcggtcgtcatctactacaaagaaatcctgtgctgcaccatctgcctggaaagcctgaacacgcaggtgctcacaaacattatactgtccgcgcttgcaagggttgcacttgccgcaaaccaactgtgggcgagcggtgatgtggtcgccaggcttgcagacggtaacttcgctgcctacagccataaccactcctgagtactcatgtccctgaaccactgggtagaaggtggctgggtgaagaccgtggtaagagtgaatctcgctaccgcagatgccgatgcgcttgatgttgacgagaacctgatgagcagttaagtctgctgcctttggttctgctacttccttgaattcgatatgctttggttctaccaatattgcctgtctcataattataatgttttgaaattgttattgttatgttggtgggatgaaagatcccgttttatctttgtattcttttctgaacccactttttaagtgggctcttttttatttcttcttattctccagatcggtcatgatctgcttgtattgcttcttgttgagcttgtagaagcagaggcatcctgcggtgacgatccacaagactcccggaatggtgctgaaggcgtggtgcatgatgttcaatacttctggattctgcacagcgttgcttacatatcctgcactgcccagggcaatggcgagaagcgatgtgccgagtgccattcctatcttgttgcccagcgagatgaaggcgtattggaatccgtcgtttctgatgcccgtcttccactcgccatactccacacagtcggggatgatggcatagatggctgtattgaagcctgagaagaagaaccacgacaaagctgagaacagatagaacatgatggcgctgccgttagggctgaagaagtacagacctatcatcgtaataccggtgaggaaagcgaagatggctgccgtgaaacccttgttgcccgtttttctgaataccaaagggaagcaggcggcacctatgatacttggcacgatgatggccatggaatagtaggagaagagtgttgctgaatcttccacataagtgaaatagtagagcatgtcggcgttgcgtccgtagtggatgaaaccgaagagcaactgtcctaagagggcgagcagatagggcttgttcttcatcacggaacgaagctgcacctttaatgggagcttctgtcccacaggaacttctaccacttccttggtcttatggaagcagaacagatggcaggcggcgaagatgatgccgtagagtactgccactgccagataaccatatttggtgtcgcctgcgccaaaccaactgatgagcggaacggttacgatgttgattactccgatggccatcatggcgctcaccgaacggctggtgttgagcttggctctctcatcgatgtcttgtgtcatggctccgcagagtgtgccgtaaggcaggttcacgcaggtatatcccagcaccaggatgcagtaggttactgccatatagataatcttggcggtctggctccattccggatgtgcccagaaggtgagtatcagtaccagtgccgtgataggagctccgaagagcagccatgggcggaatcgtccccatcgggtgtgggtcttatcggtaagtgtgccgatgatggggtcgttgatggcgtcccagaatcgggaaacaagcatcagggttgctacggcactcatgctgattccgaacacatcggtgtagaaaatcatgaggaagttgcccacgaacatccaactgaagttgcagcccacatcgcccattccataggcgagcttactgatgaagggaacctttccctgtgaattgttctctagcgaagtgttcgcttgaaatttagaatcttgttccatatttcttttttaggtttgattgtgatacttaatgttgtttattctttgtcttgtgaagaaatagagcgatttgagaaatcgtttttccttttcacgctgcaaagatagaatgtttttgctggtaaaacaagaaaaaaaacgattcttttttcgcaaccgttcccgcaaccgttcccattttccgcaaccgttcccaaaaagatttctcagttttttgttgttgctttcatagaaaataagtatctttgcagtcacatttaacaagaaagaaaaagtgatatggcaaaatatgtaaccatcatggatattgcaagggagttgggaatttccaagtccaccgtttcgcgtgctctttcgggagatacgggtaatgtgaagacggataccttgcagaagatattggcaactgccgagcggatgggctatcatcgcaacgaactggctgtgaactttcgccagcagagtactcataacatcggcatcatcatccccgaaatcgtaacaacgttctatatgacctttatcaatgatgctcaagccatcttgcgcaagcaggggtataaggtaatgattgccatctctaacgagaatcctgagcaggagagagagagcattctgatgatggagcagctgcgtgtggatggcatcctgatgagtgcatgcgataaggagcataatgtggacctatataataaggtgatagaaaggggcattcccattgtgtttttcgatagaacggtggagaaggtaaaggcttcacaggtgcacatggacgattacatcatgtcgtttttcatggtggagactttgttgcgcaaggggtataagcatattattcatatcccgggacctgcttatatccgaaacagctatgaacgattgaggggttatcgggatgcgctggaaaagtttcatatagagtatcaggcgcaagatgtcttgtcgccagcattgtcggctgaagagggtagttgggtgatggagcgtttcctggagaagaatgtgccctttgatgcggtatttggctttacggagactgctgtgttgggagctaagagtgctatccagaagcgtggcttgcgcattccggaggatgtggcgctttgctgcatgtctggcacagctctggctactttggttcatcctcagttgacggtagtggagcagcctattgagaaaatggcgcaggaaagttgccgactgctgctggagcatattgccgatggttatagaaggatagaggaaattgcattgagaggtgaaacagtgataagggaatctacttaataaaggtatcggcttcaggaatctgcataaaagaagctgtttcagaaaacagtgtaaaaggaagctgtttttgaaaacagtgtaaaagaaacgggtgtatcatctatattattgaatgatacacccgttttctatttctttatcttaagcttttaaacttaatctatttccttatcttaatcttcctcttcttcttcattctccagcaagtcggtgccgaggtgagtggtctgttcacgcttcaaacgatcgcgcacttccttaggcttggtggcgtaggtaatcattcggatagaatcgttatagcttacgtacttccagagccagttgagcattaccattactttgttctttacgccaaggatagagcggaggtgaactaccagccacaatacccaggcaaagaagccctggctgtggaacttgcctagttctactacagccttgtgtcttccgatggtagccatagaacccaggttcttgtagcggaaaggcttgagttgggaatcagtggctccctcggcaatcttctggatattcttagccaggagtgctgcctgctgaatggctacctgtgccaactgtggatgaccgccaggataagctgggtctgtggtctggatacactggtcgccgatggcgaagagaccgtccatgccagggatgcggttgaattcatctactacgattcggaaaccacggcccagatggtcaccatcaatacccgtgataggctgtgcctttacacctgatacccagaggaaggtgcgggtaggaatctcctgaccatccttcatcagtaccttgtggtccttgtagtcggttaccatcttgccaaactgcacatccacacccatgcttgtgaggaaatcgtatgctttcttagaagagtcctgtgacattccggcgagcagtctgtcgcccgcttccagaagatagatgtgcatcagagatgagtccatatccggataatcataaggaatcacgtagcgcttcatttcagaaagggctccggcaatctctacacctgtggcaccaccgcctacaatgaccacgttcaggagttcctgtcgctcctcttctgtggcacaggtcaatgcacgctccaggttactcagcacggcgttgcgcaatcccattgcctctgaaacggtcttcatcggaatagcccacttctcgatgttggcattgccatagaaattggtagtggttcctgctgcgaacaccaggtaatcgtactcaatcttaccgatggaagtctgcagaatcttcttgtctgggaatacggctctcgcctctgccatgcggaagtagaagttcttgcgcttgcggaaaatctggcggaaagggaaggagatggagcttgggtcgatacctgctgaggctatctgatagataagtggagggaactgatggaagttattcttatcgatcaacaccacctgcaggtttgaattgcagaggtcttctgccaaacgaagaccaccgagtccgccacctacgataactactctcttcaactgatttctcttgatattaatgctcataactactgctgtttttacatattaattacatatatttgctgaaaattctgttctctataaggcgtaatgcctggttcttgctgaaaattcgattgcaaaggtacaacattttgatgaggtggcaaaggaagatgggtagaaatatgggattgaagattgttgcaatcgttctctttttagattcaggaaaatgaagttgtaaaatgtaatattcagatagcattttatgagcactttttttgagaaatgttgtcggtttaaaggaaaagttgtatatttgcatcgacaattttaaaagacgaacgaatttttataaaaacatcatgatgaaacatgtaacaattaaggatatagcccattcgctctgcatctcggtttctaccgtttccagggcgttgacggatgacaagaacattcgcaaggagacgcgcgagatggtgattgaggaggcaaaacgactcggctacaagcgcaatccggtggcgatgaacctgaagatggggcgtacgaacaccattggtgtcatcgtgccggagatgcacactccttatgcttcgcaggtgattaacggaatacaggaggtactttacaagaagaaccagaaggtgatgattgccgagagcgatgagaaaccggagcgggagttggagaacctgaagatgatggagcagtttatggtggatggtctgattgtgagcctctgcagctaccgcaagaatatcgaaatgtatcagcagttggcagcagatggtatggcgatagtcttctacgaccgcattccatacggattgaaaatgccgcaggtgatggtggatgataatgtagattcttatttcatggtggagcatctgattcgcctgggcaggaagcgcatcgtctatctgcagggacccgacgacatttataatgcctatcagcgaggcttgggttatcgtgaggcgatggagaaattccatcttttcgacccggagctgattgtgaagacgggaatgaccttcaagaatggagctgatgccatcgaccgtcttatatataataaggtggaatttgatgccgtcttcgcctttactgatactttggcgataggtgcgcagaatcgactccgtgccttgggtagacgggtgccggaagagattttcgtggctggtttttcgggtaccgaactatctaccatcgtatctcctcagattactactatggagcctccgttggaggagatgggcagaaaggcggcagaactggtgatggagaaaatcaataatccagagatggaagatagacaggtggtgctgaagaccacgatgaaatgtagagaatctacgggagaataa

SEQ ID NO: 48 - DNA, 12131 bp, unidentified
  source 1..12131: mol_type = unassigned DNA
tcagccattgtaaacctccaaaattctctgtttaaatttttctctgcctactctgtcgattgtaaacttaaagcgttcgctcggctttgcgttttctgcaaagaagttaagagcggcatcacagatttccataagtttttctttattttcgataaacggaataattgtttcgcccttgttgattgagttgccaaaaagtccgccgaatgaaacaatgtagccgtgaattgtgtcccacgcatctgtcgggcaagccttgaagcatctgccgcagtagttacactttgaattgtcaacggaaattttcccgtcctcaagagtgattgcaccctgacggcaggcctttacgcagactccgcagccgatacaagcgtcctctttccatgaaaccttgattccgcccttgataccgacatcgttttcctcagctttaaggcagttgttctgacagcctgttatgccgaacttgaacttgtgcggaagttcctttgcaaaatatctgtcgtcaagctcctttgcaagagcgtatgtatcaatacaaccgccgggacagattgcctcaccctgacaggctgtgattgttcttactctcggaccgcaaacacccggctcaacatcgccctcggcaagtgcgtccttaactgcctcaacatcatcaagctttacaaaaggaatttcaacactttgtcttgatgtgaggtgaacataaccgtcaccgtagttttccgaaacctcggcaattttcgcaagctgtttagctgtgaggttgccgcctacaactctgagcctgagcgaaaaattatttttctgtttttgacgcataaagccgccctttttaagcgtagcataatcaactgccatttctcttactcctccgattcattcacatttatactgtctacagcctgtttgaagtcagactttaaatcctcaatatcctcaatgccgacgctgattcttattgtgtcatcaaacacgcctgcgtttcttttttgttcttctgttccgtgagcgtaaattgtgcttgacggatgaattacaagtgttcttgtgtcgcctatatttgttgcatttgttgcatacttcaaattgttgataagcttaaacgctctttctttacttcctgccctgattgtgaggattgcaccgccttttcccttcaacagcttttgacaaaggctgtaataaggagaagctttaagagccggatagttgacttcgattccgtcctgtgtttcaaagaactttgcaagctcaagagcgttgtaacaaagacgctccatacgaagtccgagtgtttcaagtccgacagagttcataaaagcattaaacggtgcaaggcaacagcctatgtttcgccagataccgtttctcagctttgcaacatatgcaagccgaccgaattttttgtactctgcaagacctttgtatctttccgtattccattcaaaattgccgctgtcaacgattattccgctgattgaatttccgccgccgttaatgtactttgacgaggaatgaacaacgatgtccgcaccgtgttcaaacggccgaataagatacggagttgccgttgtgctgtcgataatgagcggaacaccgtgtgaatgaacaagctctgatacagcgtcaagatcgacaatttcaagtccgggattgccgataagctcggcaaagactgcttttgttttttcgtttatgagcggttcaatctcatcggctgtcaccttgttgacatatcgtgtaacaattccgaaaggctcaagatctccaaacaaatcaattgttccgccaaaaagacctgcgcttgcgattacttcgtcacctgattcaagaatgttcaggagtgccatcgtaacggctgccatacctgacgaacacgcaaccgcaccgacaccgttttcaatggaagcaattctgttctcaaaagatgttaccgtgggattgcctattcgagagtaggcgtagccgggagctctgttgttgaacaccttttcaagctgttcggcagagctgtgcgaaaatgcactgacctgataaatgggagttaaggttgagccaaaagccttttcaccgttaaaccccttgtgaagtaatgcggtgttaaactccataatatcaccaaccccttaatttcatacaaccaacccttttgtgtaagaccgtcgtaggaatttgtctgacggcttcgattgatataggtagattatactccattaatcatagtatttcaataggtttaataagattttacctcttgcacaatttttctttaaaatttgccgtaattccattatttcctacaatgcatatttgtttagtaggtattgatttttaaattaaaaactgttaccattattatatactctttcagcaaacaaaacgcacggaaaggagatgctaaaattgaagatttcaacaaaggtggaattcggaatcatcgctgttattgacattgcgtcacactcactaaacggcaatgcggtaacaactcccgaaattgccaaacggcaaaatatatctaaaaagtatcttgaacagattctctcatcactcagctcggcaggacttgtgcgaggtcagaagggttcaaacggcggttatgttattacaaaaagccttaaagagattacattcaaggacatcataaacgcacttgacgcaaatgttctgagcaatgtttattttaacactcggggcgatgatgatgttatgataagacttatcgacaacagtctttggtcaaagatgtcgtcatatcttcaggaatatgccgaaagcattacacttgcacagctttgcgatgagtatatcaaaaacaatgaaattgaacacaacattccgatgtactacatctgatagattacaaacaaaaagccaccgatttttatgtcggtggcttttcttgtttttatcggattttatttaaagctttcaataacctgacaggttttttcaatgtcatcttccgtgtgcgcaaatgaaacaaacatcgcctcaaactgtgacggtgcggcatagattccgttttcaagcagatgattgtaatactcggcatatctctttgtgtcggctgtggttgccgtgtcatagtcaacaacctttttgtcggtaaaaaatgccgtcataatcgaacccacacggttcacattaagtcctgcgttcttcattgcattttcaatctttgcagacttgcgttcaagttcgggatatatcgaatctttatttttttcaagaattttaagcgttgcaatgcctgcacttaccgctaccggatttcccgaaagtgtgcctgcctgataaacagaaccgagaggagcaacacaccccataatctcttttcgacctccgtaaaccgcaagcggcattccgccgccgacaatttttccgagggttgtaaggtcgggttttactccgtaaagcttttgagcaccgccgagtgaaagtctgaagcctgtgattacttcatcgaaaataagaagtgaatcatgcttttcagtgatttcacgcaagaattttaaaaatccttttttgggcggaacaacacccatatttgcggcacaaggctcaacgattacacaggcaatttcatcaccacagttatcaaaaagctgttgcacggattcttcatcgttatattttgcaagcaaagttgtgtctgtgtagcctttcggcacacctgcgctgttcggaattgaatttgtcagaagtcccgaaccgccctttacaagcaagccgtcggaatggccgtggtaacagccctcgaattttacaattttatccctttttgtaaagcctcttgcggcacggattgcgctcataaccgcctctgtgcctgaatttacaagtcggagcatttcaattgacggcatattttcgcggataagctcggcaagttcaatttctccgctgtggcacgcaccgaatgtaagtccgttctgacaggcagaagtcacggccttgataacatcgggctgtttgtgaccgaggatattcggtccccatgagcagatatagtcaatgaactcgtttccgtcaacatcataaatttttgaaccctctgcacggtcgataaaaagcggagttcttccgaccgaacggcacgcacggacaggactgttcacaccgccgggcataaagtcaagcgcctgtgcgtatagcttttcgctttgagttgtattcataaaagcacttccctatttgtaaaattcgtcaatccattttgcaacatcaagtgcgtggtatgtgattatgatatccgcacccgccctcttgattgcaatcatattttcgcacacaattttcttttcgtcaatccagcctttttcggcagccgccttgaccattgcatattcaccgcttacattataggcaacaagcggaaggtcaaagcgttcgcttgcggcttttacgatatcgagatatgcaagtgcaggcttgaccataaccatatccgcgccctcgtcaatatcatctgcaatttcacgcagagcctctttgccgtttgcgtaatccatctgatagctttttctgtcgccaaattcgggggcagattctgcggcatcacggaacggtgaatagtagcctgatgcaaattttgcactgtatgacataatcggagtgttgataagtccgttttcgtcaagtgcgtttctgattgcagacactctgccgtccatcatatccgaaggagcgatgatatccgcacctgcttttgcaaggctgacagccattttagagaggagcggaagtgtttcgtcattgagaatttcgtgaccgcaaacaacaccgcaatgaccgtgacttgtgtattcacaaagacagacatcggcaataataaggagtgacggataatttttctttatgtatctgattgcgttctgagttacaccgttatcgtcataggctgatgttgcaagctcgtctttatgctttggaattccgaaaataagaagtcctgcaatgccgctgttttcaatttctttaagaatctcgtctgatctgtcaagcgaatattggtagacattcggcattgaatcaacaggctttttaatattttcaccctctgcaataaaaatcgggtaaatcaaatcgcccttgtcaattcttgtttcacgaacaagactgcgaatctgctcgcctgctcttaatcttctgaatcttctcatatatttatccttctttcaaagttacttccttgattatagtttccaaaattccgtctgtgtccttcgtttttgcaatcctgaacgaatttacgccgtgactttcaagtgcctcggcggtaatttcgcctatgcagacaacggaagttctgtcggaaataattgctccgccgtcaaaaaatgtgttcacacccgacgcactcgcaaaagtgataaaatcggtatcaacaacggaattatcctgttttttctcaagctgaatgtcataggttttgacatcgtcaaagtcaatgttgctatcagccaaaatccgagtgagttcgggcgaaccgttttcggcacgcagaatcaatactttttcgccgcttttcaccgtttttgcaagcaaaattccaagttcacgggttgtgtagacattcggaatacagtcggcaaaaattccgtacttttcaagtacagccgcagttcccgaaccgatcaccgcaaacttaatatttgcaaaactgcggatatcctttttcagcttacgcagtcggctcataaaaatttctgcaccgttcatacttgtaagcaccacataatcgtagccgtcaataccgtttattgcattgtcaaaaacttcgttgtcatgatattcaatcacctttaaaaggtcgtgccttttgacctctgcacccgaaagcgtgagcattttgccgagcttgtcggagagctttctcgtacccgtaactgtaaccgaaacatttttcaaaggtcttgtaattgtgggggtaaagtcaaattttgcggtttcgccaaccactataacggcaggcggtacaacctctgctgatttaacattttcgcagattgtcgagagagttcccctcacggtctgattttttgcacaagcgccgtttgacacaactgcaacgggagtatcctccgatttaccgttacgaatgagattttccacaatgtcggggaggtttctcaatcccataagaaagacaagcgttccgtcggtttcggcacacttctttatattttcgggcagggtgtcctgtgccgtatgtcccgtgattatatgaacacttcggctcagatttctgtgtgtaacagggattcccgcaagttcgggaacggcaatcgaggaagaaattcctggtacaatatcaaacggaatatcggcacttttgagggtttcaatctcctctccgcctctgccaaacacgaacggatcgccgcctttaagacggacaaccgttttgccctctctcgccttttcaacaaggatttcgttaatattttcctgcttttcgctgtgtctgcccgaacgctttccaacacagattttttcagccgtttcgggtgcaaaaccgagcaatgactcatctataaggctgtcgtaaacaagcacatcgcaatgtctgatatactccgcaccacgcattgttatcaagtcaaaatcgccgcatcccgcaccgacaatatacactcttccgttactcaatttcgctcaccagcctttttgcaagtttgattctgtttgaaatttcatctgttccgctgactgtttttttgcagtcggcagacagagaaagcattatcctgtcgttttcaacctttgaaattgcaccgacgggagttgaacaatcggcattgaggctgagcagaacctgtctttcggtttcaaacgaaagcattgtatttttgtcactgatttcagcgagcattttggaaacctcgctgttttttctgctttcaatcgcaactattccctgacacggtgcagggagaaattcatcggtatcaaacggagttaccgtgtaatcctcaccgttgcaaaggtcaagtctttcaagtcctgcctttgcaagcacaagagcatcgtactcaccgttcaacagctttttaagtcgggtgtcaacattgccccttatatcattgaattttgcattaggatagattttctctgcaaaaagctttcgccttaaactgcctgttccgatgacaaagccgtccttaatttcaaaattgttgcgtgtaacaaaaacatcgccatagctgccccttggcaacacggcggaaatttcaagtccgtctgcaatttttgtcggcaagtcctttgcactgtgaacggcaacatctgtttctccgctcaaaagtgacatttcaagctccttgatgaacacaccttttccgcctaaagctgtaagcggtttgtcaagggttttgtcgcctgttgtcgagatgtaaaccgtttcaattttaacattcggaaaacggtttttcagcgtttttattaacatttcggtttgtgcaagggcaagcctgctttttcttgttccgatttttatcgtcattgttcgtattcctcaatcaaattttcaacagttttttcatcgggttcaagtcccgaaaggcaaagcgaaagaagctgttcaaaaatcttccttctgtcatcttccctttcaaccttctccttaattatcgggcgatatttccacaaaacctcggttgtattttcgttcatactttcaaggattcccacaaaaagctctttaagatattttgcgtaaatcggacttttgcccgatgttgtaattcctgccgttatgccgtttttgcttgcaattgcaggaaaaataaatccgcatttttccttatcgtcaactgtgttgacaagaatatttttctcattgcaaagctgaaaaattctgccgttgagcgtttcatcatcggttgcgctgacgacgcaaaacgcaccgtcaagatcgctgtcacaaaatctgcggtcaatgattttcacatgcaaagccttgatttcatcgcagattttcggggcaacaacggttatgtccggcgaaaacggcatcagcttttcaatctttctgagtgcaaccgtaccgccgccgactacgagtatttttttgttttcaatgtcaatataaaacgggaagtatgccattagttattctctccgcactttctgtagatttcaagaattcttgcaaattcttctgccgaaacatcggatttcagcttataaatgaatttttccgaaaaatctgacggcattgcgtttttcacagactgcatacacggcagaaattcatgaaaggcaaggtcttttttgagaacttcaatttcctcaaaaattatttcttttgcactttcaacgctgtcaagtttgagagcattgttctcgtttgcaagctgttttatgcagtcaatgttaatgagccttacaccgcttattttgggaatattttcgtcaatgtcgggcggtacggcaaggtcaataaacagccttgatttttcggtttttatattgttttttaaatcataatatgtaaccgtgtaatgcggtccgcttgtggcactgattacgcagtctgcaaaatcaaacgctttgtatctttcgtcataatcaatcacattcgcacccgtattttcaaaaacagtttctgctttatgttttcgtgaagtcacggtaacgcttatacctttgtgtgacaaaagatttttcacaacggttgagccgaccttgcctgttgcaccgattacaaggacattcagctcaccgtctttgaattttgccgcctcgtttgacgcaagagttgcaacggaaaccgatgtttttgaaatggcggtttcggtcttgattttttttgcacaggcaacagccgcctgaacgcacatattaagctcataggcaaccgtgccgttgtcctttgcaaaggcataggctcgctttagctgaccgagtatttcatcttcaccgataaccattgattcaattccgcctgccaccctgaaaagatggagcaaagccctgtcaccgtagaaaagacagatgtatttttttagttcgtcaaaatcaattcccgaaaaatccgaaagaacggtttcaaccgttttcacagatgattcgtcaccgcaaaaataaacctcggttctgttgcaggtgcagagaatcaaacactcgctaatattttcagaataaaaaagttcgtcaagaaatgtctttttttgttcatcgggaaaggcaagcttctttctcacaaccacatttgaagttttgtgacttacgctcaggcagtacataaaaatttcgctccgttacaaataaaatccgacagtaaaatacacttttaaagttattttattactgccgacagctattgtcaattaaagttagtcagttattttaccactaaacctatctgtttggtatgttttgattatactacattcaccgttccatgtcaataaatttcgggttttgcttgacaaaaacagtgattacaatataaactatacaaagatacctcccgtcagcaaacagcgggagttttattccgatgtaaatacttatggtaccgataggaatactaaatgatttgaatatgtattaaggagcgtttttatgcttaatcagttttcaagaacacagcttttgattggcaaagaagctatggacaggctttcaaaaacaagagttgcaattttcggaatcggcggtgtaggcggatacacggcggaggctcttgcgaggagcggagtcggcgagcttgaccttattgacgatgacaaggtgtgccttacaaacatcaatcgccagatttttgcaacaagaaaaacagtgggcaaatacaaggttgatgttgcagaggaaaggctcaaggacatcaatcccgaaatagtcatcaacaaacaccagaccttctacactcccgaaacctcggaaaaattcgacttttcaaaatacgactatgtagttgacgcaattgacacggtaacaggcaaaattgagcttgttatgcaagccgacaaagccaagacgcctatcatctgttcaatgggagcaggcaacaagcttgatcctacagcgtttgaggttgccgacatttacaaaacctcggtctgtcctcttgcaagggttatgagacacgaactcaaaaagagaggtatcaaaaagctgaaggttgtttattcaaaggaaaagcctatcacacccgttgacgatatggcaataagctgtaaaacaaattgcatatgccctccagaaactgagagaaaatgcacccaacgcagacaggttcccggcagtaccgcatttgttccgtcagttgcaggtcttatcatggccggcgaagttatcaaggacttgattaagtaaactaatatagttgtcttttcattttaatttgctattgttaaaaattgcaatttatagtataattatcctaataactatttagaggttgcaaaatgaacagatatataattattgcaggagttaacggaacaggaaaatcaagtttgcgtggtgttcttgaaggacaggaagttttgcttggtcatataattgatgctgatgctattgcaaaaatgaacaattacgataacataaaggcgggtaaaaaagcagttgaagaaataaaatactgccttgataacaatatttctttcacacaggaaaccactctttcaggacacagaaccgagaaaacaattcagcaggcgcgaaaacagggctactatgttattatgtactatgtaggtcttaactcaaaagaagaaagtcttgcaagaattgaaaacagggtacggaaaggcggtcatgatattccgaaaaatgatgtgtgcagaagatttgataaccgcttcgattctttaaaaaaaattgttccgctgtgtgatgaagtaattttttatgataatgaaaacggatttattaaagttgccgaaataaaaaacaacaaatttaattattcaaacggttacagacctaaatggattacagaatttgaaaataaactgaaattaggctaaggaaaagcaaagcaccgagaaaaattgccctcggtgctttgcttgtttttataggattttttacagttgatatcgtgattaaacagattagatgataaccgattcttcctgaagtgatttgttacggagaatctgaacctcatcgcctttggtaataaaaagccgataaagaaatacattgaccttttccccgacggtaatcggagtttcgtcaagtcctctgtacgtataaaccgtgcctccgtcacattttacggcaatttcgatattgtcgcctctgaacgaagtctttataacctcaccgacggatacagacgctttttgtgcggttgtttcgctgagctttgtcacctttacaaattcgggacggataactgcacggtcaacattatcaacaacatcaaaggtcttgaactttgtataatcgtcaagcgtagtagtctgaccgaaaaatgatgcggaaaatgcggtttggggatgctgataaatgtcaatcggcgagcctatctgctcaattctgcccttgtttgtaattataatttcatcggcaacctcaatagcctcgctctgatcgtgggttacaaatatacttgtaacgccgagcctttcaatcatatccttaagccatgagcgaagctcctgcctaacctttgcgtcaattgcggcaaagggttcgtcaagcagaagaagattcgggtttggcgcaagcgctcttgcaaaggcaacacgctgtttctgaccgcccgaaagctggcttggataacgcttttcaagtccttcaagaccgataagctttacaagctcgtttactctttccttgataaatttcttgctctttttctgaattttcagaccgaaagcaatgttatcaaaaactgtcatatatctgaaaagagcgtagttttggaatacaaagcctatgcctcttttgcttgcgggaatatcgttgacaacctttccgtcaattacaatttcgccgctgtcgggattttcaagtcctgcaatcatacgaagaattgttgttttgccgctgcccgaaggaccgagaagtccgataagcttacccttttcaataccaaagtttacattgtcggatgccttgtaatcaccgaaagttttatttatatttttaagctcaacatacat

SEQ ID NO: 49 - DNA, 7560 bp, unidentified
  source 1..7560: mol_type = unassigned DNA
aagaaatcttcccggtttcattttccttaattctccggtcagcagaagaaagagtccaccgatggcggcgatcatgcccgcatggaaactcttggtcagaaacgcaagagaaaaacacaagccgcatacataaagcatacgtccgttttcacggatctttaacatggccagcatggccagcgtgaagaacagaagatagagactgtctgcatctccggcgcggaccagatgcgccttaaagggaaaataattggcgcacaggaatgccataaccagcagagaggtgagctttccatatctgcgggcaaagagtccggtcacgaccgtggtaatcagataggcaagggcagagaagaaccggagccccactgatgtatagccaaacagggtgaaaccagccataatgctccagaaagaaacgggaggtttcacattccagtaatcgggttcattcagataggtatttaccagaaaatttccattcttcaacatttcataggcggaaataccatggcgggcctcgtcccaggagtcaatcgccttgataccaagacatcggaagcaaagaaaggcggtcatcagtgccaaaaatgcgaaaaaaaccggatagagacggtcaatcagacgcagaagccgtgtataaaatgatttcataaaataaatcctcataatctaaatagttacaaaaaatatagcatggtcacgaaaaaaagtaaacgctttataaaggctttacaaagcttctgtatgattgataatattgtaataggaaattaaagagagaagagtcatgaacaaaagaagagggatgtatcaggacggaatccacgtgaaaaacaatttttccatgagttccggaactctttctgtggcagccggagacgatgcactggaggcagaggcgctggtacgaatcagtggaggatctgtgtttctggatgcagaagattatctgattcactgcgatggggagcaggaactgaccaggggctgtgttttttatgaaaaacagtgacagacagggaaaatcatgctataatcagaccaaatgcagtgggatcaaagggagtactctgccctgacggctgctgaagaaagaataaacagattttacatggtggaggaaatttcatgagaacttatctcgtaacaggcggtgccggatttatcggctccaattacattcattatatgttccgcaaatacggcgaggagatccgtattatcaatgtggacgtgctgacctatgcaggtaatctggagaacttaaaagatgtagaggactatccgaactataccttcgtaagagcagacatctgtgacagcgaggcaattaccaaaattttcgaggagaatgatattgaccgcgtggttcatttcgcagcagagagccatgtagaccgcagtatcaagaatccggaagtatttgttaagaccaatgtactgggtactctggtcatgctaaatgcagcaaaagcagcatgggagctgccggacggaagctttaaggagaataagaaattcctgtatgtttccactgacgaagtatacggttctctggatgacggagataattatttctatgagacaactccgttctccccccacagcccctactctgcaagcaaggcaagtggagacatgctgaccaaggcatattttgatacttataaattcccgtgcaacattaccagctgcagcaacaactatggcccgtatcagttcccggagaaactgattccgctggtaatcaacaacgcactgcagggcaaagcgctgccggtatatggtgatggtaagaatgttcgtgactggctctatgtagatgaccatgcaaaggcaatcgacatggttcaggaaaaaggaaaactgggcgagcgttacaacatcggcggacacaacgagaagcagaacattgagatcattcatattattctggatactctgcaggagatgcttccggacagtgatccgagaaaagcactggtaagcgagaagctgattacctacgtaactgaccgtaagggacatgaccgtcgttatgccattgcaccggacaagatcaaggcagagatcggatggtatccggagaccatgttcgccgagggcatcaagaagaccattcagtggttcttcgagcatgaggactggatgaagaatgtgaccagcggtgactatcagaaatactatgaagaaatgtacaaaaataaataaaaactggctggtaccggcgctgggagtgttgctcgcagcgctggctctggtatttggaaagaccggtatttcccagaatggatttacgctgaatcagtaccacaatgcggatgccaaattcatcggtgatcacattatcaccagcgtggatgaaggaatccggattctggatctggaaggaaagacggtggcttcctatgacgggctggctgcttcctggatgtatgtgatggaagatgatgtggagtcgagagggccggaagatcactggttcatcgcttacagtaatcatgcggatgaaacccatattctggagctgaccgctgattttcagctggtggaagaccggattgcggtgaccaccgatacgctggctattgatccgattctggtgaagatggaagatggctggctcctcaccaatacagagattgacggaacgatcaacaatgcgtcaccggacggggacaacggaatctattctgtacagctctacagctccgcagacctgaagagctgggaaccgctgaccactgtcatcagtgaaaagcagaatctggaagacggagatatccggtatcttgacgggacactctactatttctttgagatggaagattatgataaaggttcttctaagatctgtgtcatgacgtctgatgatcagggcggaagctggagtgatccgatcgtactcctgcccaatgtggcggacaacgagatggcttcctgtgaacagaccgactatggatggcggctctatgtgagcagtgactatgcctgtgtaggagagagctatcagggtgccagtgtctattacaacgattataaagaggattttactccgatcagcacctatcagcggtcggagatgccggacaatgaatctgtccggttatatgaggcaaaagaaattgacggtcagatgaatttcctgtttgcaaggaattttctgacggactgtgatcttctgcttcgcactatggaaaagggggatgagatgcaatgaaaggaattattttagcaggaggatcaggaacccgactgtatccgctgaccaaggcagtgtccaagcagattatgccggtatatgacaaaccgatgatctactatccgctgtccattcttatgctggcaggaatccgggaggtgctgatcatctccacaccgagagatcttccggtatttgaagagcttttaggagacggaagtcagctgggcatgcgttttgagtatgcggtgcaggagcagccaagaggactggccgatgcctttatcatcggcgcagattttatcgggaaagacagcgtagcactgattcttggcgataatatcttctacggacagagtttctctcaggttctcagaagagtagcagcccaggagagcggagccaccatcttcggttactacgtaagagatccgagagagtacggtgtggttgagtttgacgaaaatggcatggcgatctccatcgaggagaaaccggagcatccgaagtcaaattatgcggtaccgggactctatttctatgacaatgatgtagtggagatagcaaagaacgtaaaaccgtctgcgagaggcgagattgagattaccagcatcaacaacgagtatttgcgcagaggaacccttcatgtggagacactgggcagaggatttgcatggctggatacgggtaatcatgatgcacttctggatgcggctgactttgtggcagcattccagaaacgccagggactttacatttcctgtattgaggaaattgcgttccggagaggatttattgataaagaacagctgctgaagctggcagagccgctgatgaagaccgcctatggccgttatctgacggaagtagccgaagggctgtaaatgaaaaattcaggccccggaagagcgcatacctgcgaagttccggggttttatcaaattttgaagaagaatggagaaaagaaatgggaaagattactgtagaaacctgtgatattgaaggattgaagatcattacaccgactgtattcggagacgagcgcggatattttatggaaacctataattataatgattataaggcagcaggcattgatatggagtttgtacaggacaaccagtccgcatccaagaagggcgtgttaagaggtctgcatttccagatcaattatccccaggacaagctggtccgcgtggtaagtggagaagtatttgacgtagctgttgacctgcgcccgggttctaagacctacggaaaatggttcggtgtactgctttccgcagagaataaaaagcagttctttattccgaagaactttgcacacggattcatcgtactgtctgattacgcagagttcgcttacaaatgtaccgatttctatcatccgaatgatgagggcggtctggcatggaacgacccggatatcggagtagaatggccgatcccggaaggcatggagctgacgatttctgagaaggatcagaagtggggcggcattaaagaactgaagaaataaggagagaccctatggtccgtatgtggaaagatttttgggcgagccggaaactgatctggaagcttgccagaaatgattttaagacccgttacgccggctcttattttggcgttctgtgggcaatggtacagccggtcatcattgtactggtgtactggtttgtattccagatcggtttaaacaatgcgacggcagagttaaagcagggaatcagcgttccctttgtgctctggctggtcagcggtattgtgccgtggttctatttctccgagagcttaagcaacggaaccaatgcgcttctggaatataattatctggtaaagaaagtggtcttcaacattgacattctgccgttggtgaagaccattgcagcactgtttattcatgtattttttgtgctgttcatgttgtttttatttgcactgtatggctattatccggggctgcacacgctgtgggtcgtgtacttcagcgcatgtcttctgatctttgtgaccggagtctgcatgctgaccagttctctggtgattttcttccgggatctgacccagattatcaatatttttctgcaggtcggcatctggatgacaccgattatgtggaatctggaagatttgcttgcaaaatatccgattcttatggtgctgaagctgaatcccctctgctatatcgtctatggctatcgtgcggtactgtttcagaccggttctgtggcaagccttggctggatgaatatttatttctgggcagtgaccattctggtatggctgctgggaagtcatgtgttccggaaactgaaagtgcattttgcagacgtactgtaaaggagaactatgagcagcgaagcaattaaacttgagcatattactaaaatttataaattatacggccggaacagagaccgcctgaaggattccctgggacttacgaagaagaaatgctatacggagcattatgccctccgggatgtaagcatggagattcatcagggagagacggtgggaattatcggtgtcaatggatccggtaaatctacgattctgaagattatcacaggtgttttaagcgccaccagcggcacgatggagattaatggaagaatctctgcccttctggagctgggagccggatttaatatggaatataccgggcttgagaatgtgtacttaaacggtaccatgctgggattttccgaggaggagatcaatgaacgtctgcaggatatactggattttgcagatatcggagaatttatccatcagccggtgaagacctattccagcggtatgtttgtgcggctggcttttgccgtggccatcaacattgacccggagatccttattgtagatgaggctctgtctgtgggagacgtgttcttccaggcaaagtgttatcataaatttgaagagttcaaaaagcttggtaagaccattctgttcgtcagccatgatctgaccagcattgcaaaatactgtgaccgtgtgattctgctgaacaagggcgtgaagctggcagagggaacaccgaaggacatggtcaatatgtataagaagcttctggtgcatcagctggatgaggaaacactggaagatgtctgcgagaaaagtgatattgtggagcacacggcagacggaaaagcatggaaagaccattttgaaacgaatccgaagcttctggactatggcgagaagcaggcggagattgtggattttgccatcattgaccaatatggacagtattccagtattattgagaagggttccacctgtcaggtcaaggcgaagcttacgttccacagtcaggtgaagaatcctatcttcactattaccatccggaacaagcaaggaacggatattacgggaaccaacactatgtttgaacgtgtggagaccggaaccgtggaagcgggagagacaagaatcgtcacctatacccagcggattgacctgcagggtggagattatctcatttcccttggatgtaccggatatgtgggagatgaatttaaagtgtaccacagactctatgatctggtgggaatgaccgtactttctgataaggatacggtgggcttttatgatatgaactccgtaattaccgtggagaacccggcagagcgccagggctgattcggaaaaaattttgcagcaggcaggaaggaatgcatatgcaggaacagtttggccatgtaacagtgacatatgatgaggagactgctttactgcagcagccccgcccggaagatcttctggtggagcagttgctggaggaaggctttgactgtaagagggcacaggcaccgtccttccctgttctttatcatttatctcagcttcgcggaaatctgacagaatggctgccggtgaaaatgacagatacagtgctggaatttggcgccgacagcggacagctgacggggggacttgcaaagaaggcagagaaagtcatctgtctggaggaaagtgtgagtcggtgcagactgttggcaaaacggtggcagacagtggataacatctccgtatttggcggaagtgtgtggacaacgctggaaacccttccgagattcgactggattgtggccccgggtgtgctgacggaagcacatcgatattttaccggagaatatccggaacaacaggcgctgaacattctgaaacagcatctgaagccggacggtcatctggtgctggcggcagacaaccggtttggcctcaaatactgggccggggcaaaggaaccccatacaggtcagtattttgacagtctggaaggaaaagccacttctttttcaaagcgggagctggaaacgattctgactgacaagatcggaagagcg

SEQ ID NO: 50 - DNA, 7216 bp, unidentified
  source 1..7216: mol_type = unassigned DNA
ctaatccttaatcccttgtttcaagtattcgtaaaagctatattgcgaccgtaccttctccttttgcggtcgcgacgacttccagcggtttcgcaaccggtcgtccacaaagcaggctttccgtttgtccgacagttgtatggatagcatatcgatgagctcttgcttcaagtccgggtccagaatgggggtgacggcttcgatacggcggtacaagttacgccgcatccaatccggcgagccgaggaagagcttgggtgcgccgccgttgccgaagtaccacacacgggcatgttccagaaaggtatccacgatgcgtgtcacgcggatgttgtggctgtactcctgcccggggatgaggcagcagatgccgcggacaatgaggtctatctctacaccggcttgcgaggcttcgtagaggcggtctatcatggcagggtcttgcagggcattcatttttaggataatccgtccttgcttgccttgccgagccagttctatttcgtgattgatgaggcggttcagttcaggaatcaggttgaagcgggccacaagcaggcggtggaacactggattttcctttccctgcagagtacggaacaagttgtgcaggtcgtttacaatcaccgggttgcaggtgaatagtccgctgtccgcatagagggtggcggtcttttcgttgaagttgccggtgctgatgtaggcgtagcttgtcagtttgcgcccttccttgtcgcggcgtagcacgagggctactttggcatgtacctttagtcctggtatgctgaaaatgatgttgatgccggcggctttcatcatctcggcggtggcgaggttgttttcttcgtcgaagcgggctttcagttccacaaagacggtgactttctttccggtctgtgcggcggctatcagggtgttgatgacggtggagttctctgccacgcgatactgggtcaccatgatttcacgcacggtgggttcgtggacggcttcatatagaaaatggatgaagtggtcgaaggagtggtagggataatgcagcagcaggtccttcttctccacatagcggaagatggattcgcgttcgtccaggcaggtcagcttcatgggctggggtttcttgatgggacgtacgctttggttgggattaggcagatgccgcaaatcctccatgttgaggtgcttgtctcccggcaccagctcccggcggtctatgcggtaggcatctaccagaaagtcgaggaagtcctggggcatggcgcggtcgtatacaaaacggcacacggcgcctatcttgcgtttctttaccttcttcttcacctgctcgatgatttcggaggtattggcggcatcgtctatcagaatatccgcatcgcgtgaaatcttgatgcaataactgctgtccacttcataaccggggaagatggtatccagattggccttgatgatgtcttcaatgaacatcagataatagtctttccccaccttgggcagctggatgaagcgcggcactttgctgtacggcagtttcatcacgaaatactggatgcggtttggagaactggcgggagctcctttcagatgaagccgtacggctagatagagacggttgtcgcgcaggaatgaaatcaccttgtccttgcttacgggcaccggggccagataggggaatatctcttcgcggaagaagctgcgcacaaagtcgcggtgaaacggttctacgttgcggctttgatagaatatgatgtgatgtttccgcagggcgggcagtatcttctgttcgtagatgcggatacgttcctccagttggcgattgacttcttggttgatttcatctaccagttcggcggcagactgcatagtctcttcatcgctttgcgaggctccggtggctatggccttatggtcggctacgcgtatcttgtagaattcttccagattggaagagtatatagaaataaagttgatgcgttcgtatagcggcaatgtctcgtcttccgcttccagcagtacgcggtagttgaaggaaagccagctgatgtcacgtttgaaatatctgttgtccatggtgttaaggtgttaatgtggcatattagcacattaccacattgtattcttcccaaatataattacctttgtcttaataaacaaaggaaagatgacaaaagttggtttattatcggatacgcatggctactgggatgaaaagtacctgcaatattttgagggctgtgacgaaatatggcatgccggtgacatcggttcgctggaagtggcacagaagctggcggctttccgtcccttccgtgccgtgtatggcaatattgacgggcaggagatacggcagctctatccgcagattctccgtttcacggtggatggggcggaggtgctgatgaagcatatcggcggttatcccggcaactacgacccttccatcaagggcagcattctggtgcgtcccccaaagctgttcatcagcgggcactcgcatatactgaaggtgaagtatgacaagacgttggatgtactccacatcaatccgggcgctgcgggcattcaaggtttccataaggtgcgtacgatggtacgctttgcggttgatgggggaacgtttaaagatttggaggtgatagaacttgctgaccgatgatgtagtttgtttattttcaatggattgtatttaccgattgtttacgctgtagtgtaaaagccgttacatgctaatgtaaaggtcgttacgctattgggtaaaggccgttacactatttggtaaaggtcgttacacgctgaggtgaagaccgtttcatcaaggggtgacggccgttacgcactgaagtaagcaaaacaatgtaccggagtaagcaaagcaatgaagtaaaaagatgaaaccaagccttcacttaatcgaatttttccattatctttgtacccgaatagcaagtagagccgtggggcatcgtcctccttcttattttattctccattttgaagtatcaccgaaaaagaactgaaatatgaaaggaattattcttgcaggtggcagtgccactcgtctctatccgttgtccaaggctatctccaagcagataatgcccgtctacgacaagccgatgatatactacccgctctctacactgatgttggcgggaattcgcgaagtgcttattatctctactccacgtgacttacccatgttccgcgagctgctgggaaccggcgaagaactcggtatgtccttttcctataagatacaagagaatcccaacggactggcacaagcctttgtgctgggtgcagagttcttggacggcggaccgggctgccttattctgggcgacaacatgttctacggtcaaggcttctccgccatgctgaagcgtgccgcttccatagacaagggtgcctgcatctttggttattacgtcaaggacccccgtgcctacggtgtagtggagtttgatgccaacggcaaagccgtctcgctggaagaaaagcctgccaatcctaaaagcaactatgccgtccccggactgtacttctacgactccaccgtgacagagaaagccgcctccttgaagccctctgctcgcggagaatacgaaattaccgacctcaaccgtctctatctggacgagggcacactgaaagtggagctcttcggccgtggctttgcctggctcgacaccggcaattgcgacagcctgctggaagccagcaattttgtcgccaccatccagaaccgtcaaggcttccgcgtgagctgtatcgaagagattgcctggcgcaagggctggatagatgtagaccagctgtatcgcttgggtgaacagcttggcaagaccgaatatggcaaatacctgatggaactggctgaatcgaagcgatgaactctttgttccccaaaaagagaaggagaatagttctcctataaaggcccgctgactttaatttttaatttataatttttaattctcatgaagacttatctcgtaaccggtgccgccggttttatcggcgccaactatattaaatatatcctggcaaaacataatgatattaaagtggtgatactggatgccttgacctacgcaggcaatctgggcaccattgccaatgacattgacgatgaacgttgcttttttgtaaaaggtgacatctgcgaccgcgtgcttgccgacgaactgtttgccaagtataaattcgattacgtagtgaattttgctgccgagagccacgtagaccgtagcatagagaatccccagcttttcctgatgaccaacatcctgggtacacaaaacctgctcgacgccgcccgccgtgcctgggtcacgggcaaggacgagtccggttatcccacttggcgcaaaggcgttcgttaccatcaagtgtctaccgacgaagtttacggctcacttggtgccgaaggctacttcacagagcaaaccccgctctgcccgcacagcccttacagcgccagcaagacgagtgccgatatggtagtgatggcctatcacgatacctataagatgcccgtcactatcacccgctgttccaacaactacggtccttatcacttccccgaaaagctgattccgcttatcatcaagaatattctcgaaggcaagaacctccccgtctatggcgacggcagtaacgtgcgtgactggctctacgtggaagaccactgcaaagctatcgacctggttgtccgcgagggtgtggaaggcgaagtctacaacgtaggcggtcacaacgaaaagaccaatcttgaaatcgtgaagctgactattgccaccgtccgccgcttgatggaggaagaaccccgttaccgtgcagtgctgaagaaacaagtaaaagccgccgacggcacgattgacatcagctggataaacgaagaccttatcaccttcgtcaaagaccgcctaggtcacgaccagcgttatgccatcgactccacaaagattaccaatgccctgggctggtatccggagacgaagttcgaggtcggcatcgtcaagaccattgaatggtacctgaacaaccagccgtgggtggaagaagtgaccagcggtgattatcagaagtattacgaacagatgtatggaggtagaggttaaggtttagggattagggtctaaccgctaatccttaacctctaacctctcaattcagcgccaccgctaacagtaatcctaagaacagcatattgcgcgacgtctcgcccagtatgctgttcagctttttaccgctacctatctgtatcattttgcgccacgtcagtgcgtgcatatagagatagacgcagggagcccagataaattccagcggagtcagcttgcccgtgtagacaaaccagaagcagagcagcacggcggcgatgcccagtgccagatacatattctcaccgaacttcttgccgtagcgtaccaccagcgtacacttgccgctcacggcatcctgctcgcggtcgcgatagttgttcaccatcagcaaggtgtctatggcgaggccactgacgagcgacagcaccaccacatccatattcagcgtataggcctgcacgtagtaggtgccgcatacgggcacgaagccgaagaacaccagcaccagtacgtcgccccagccccgataggagagcagcgtggtatagaggaaagcaaacagtatgcacaccacgcccagcaccaccagttcccagcctccgtggggcagctgcccccagacggtgaacagcactgccagccctgccaggcacgacagtgtcagtgcgatgccgatgccggttttcatggctgccggcgtaatccaaccttcggcgcaggcgcgctgcggccccagccggtcttcccgacggtcggtccctttctggaagtcgaagaggtcgttgataaagttggcggcaatctgcatgccgcaggcaaagagggcgcacagcagggcgggtgcggtcttgaactgtccgtcgctgaaggcaagggcactgcccagcaataccgggatgatggctcccgtcaacgtcttggggcgggcggcgagaaaccatgcgtagggtgaattctgtttaatctcgttcatcgtagttccaatttagttcggcatctgccagcaaaaatactgaaaatccctatatttgtacccacttatgatgaagaagttagtctacatatccattctttctctgctgctcttgtcttcctgccgttccaagcggatgattaccgtgtcgttgccgcagccagtcatgcaggcagacagcacgcagcttggcgatactatcgggttgcctgcccgcctttcgccgatgttcacctttgaccagtctgatttgcgtaatgtccgccgccagccggcgaagggcgaggtaaagaaacagcagataaagaaaacggcaccggtacaaaaggtaattgtgcagcgaggtacaagaatcacatcgaaaaccacccacgtaggctcggcctataagggcgtcagccgcattaagacgtacgacttcacgcatcgcgacgtgcctgccgccttcgagggcttccgcatcgcctttgtctccgacctgcactacaaaagcctgctgaaggaggagggattgaaggacctggtccgcctgctcatagaccagaaggccgacgtgctgctgattggcggtgactttcacgaaggctgccagtacgtgccacccgtcatggctgccctggcgcaagtgaagacgccgttgggcacctatgccgtgcttggcaacaatgactacgaggcttgctatgacgacatcgtgcgcgaaatgaggcattatggcatgcatctgctggagcataaggtggacaccctgcggcgtggcggtgagcggattcttgtggcgggcgtgcgcaatcctttcgacttgggcaagaacggcacatcgcccacactcggcctttcgcccgacgatttcgtaatcctgctgacgcatacgccagactatgccgaggacgtcccggtgacaaactccgatctcatcctggccggacacacgcatggcgggcaggtgacgctgttcgggctttatgcaccgatagtcccctcgcactacgggcagcggttcctctccgggctgaagtacaactcaaagaacatcccgatgattgtcaccaacggcatcggcacttcgcagaaagccatccgcatgtttgctcccgcagaggtggtgatgattgtgctgcaccggctgacggactga

SEQ ID NO: 51 - DNA, 19401 bp, unidentified
  source 1..19401: mol_type = unassigned DNA
atgccgaatatgtcacctaaaaaagctcctatgcctacacaggagcctaatgtaagaaataaaaactttcttgaggtagctacaggctacacagaggaagttgcaatcgaagaggcacagcgttgccttaattgtaagcataagccttgcgtatcgggctgtccggtacatatttcaattcctgattttattaaggaagttgcacagggcaacttttcgggtgcttatgatgtaatttcaaaatcaagctcacttcctgcagtttgcggccgtgtttgcccacaggaaacacagtgtgagtcaaaatgcgtaagaggtattaagaccgaacctgtaggtatcggcagacttgagagatttgttgccgactggcacaatgctcagacagatgttgttgtaaataagccggagccaaacggtcataaggtagctgtagtaggttcaggcccttcaggtcttacttgcgcaggcgatcttgcaaaaatgggttacgatgtaactgtttttgaggcactccaccttgcaggcggcgttcttgtttacggtattcccgaattcagacttccaaagtcaatcgttcagaaagaagttgatacacttaaggctctcggcgttaaggttgaaacaaatatggttatcggcagagttatctctattgacgagcttatggacgatatgggctttgaggcagtatttatcggttcaggtgcaggtcttccgagatttatgaagattccgggcgagaacctttgcggcgtttattccgcaaatgagttcctcacaagaacaaaccttatgaagtcttataaagaggattccgctacacctattatgcacgctaaaaaggttgctatcgtaggcggcggtaatgttgctatggacgctgcccgttgtgcaaagcgtcttggtgcagatgaagtttacattgtttacagaagaagtgaagaggaacttcctgcaagaagagaagaagttgagcacgctaaggaagagggcattatctttaagctccttaacaaccctgttgaaattctcggtgatgaaaacgagtttgtaacaggtatgaagtgcgttgatatggaactcggtgagcctgacgaaagcggcagaagaagacctgttgttaagccggacagcgagtttgtacttgatgttgacgcagtagttatttctatcggtacatcaccaaacccacttatcaaggctactacaaagggccttgaaacacagaagtggggcggcattatcactgatgagcacggtcttacatctcgtgagggcgtatatgcaggcggtgacgctgtaacaggtgctgctacagtaattcttgcaatgggtgcaggcaaaacagccgcagcagctattgacgagtacattaagagcaaagagtaattcttatataaaaaacatttacccgattatagcaaaagctatagtcgggtattttttgtgtgtttcatctctaagattaataattaaggctctttatcaaaagttggtgtaattatggtttggtaaaataattaaaaaatttaggtcaagcctttttaaaggcttgcgggtttgggcagagcccataaaaagtttcccttacatcaaattatcgggcgcaaacagcaaagctgttttcgtgctaagacaatgttttgaaaacaggcgatagccttaaaaaggggaatagataaaataatgtgccgtcattgcgtagcaatgacggcacaattatagggagtatcttttctctgttgctgtcgcattggctttcgccattgtgttcaagccgccaaacggcaagccatttggctatcaaaatttgcgatagcataaagtatttgtgggcgttgcccacacccacaacctttgaaaaggttgaccaaactttttacttcgggacggagagtttagtttttgctttactttgttgcccgactgaaacttagtcataatttataattttgtcattttcttaaaaagttagtctgattttccccaccccatcactgcaaaacagcaaacaaaaacccgattatagcctttgctacaatcgggtatcttaatacttttctaaatcagcttaccgcttttttataaagctttttataaaccaagaacaatgccaccgatactattaaaaagaacagtgagcacgcaagcacgcacattataatgttatttgcacacgatacaaacagcatatatgttgctcttgacgctatgttaaaggtttcaatcttctttgacagcaaaattactatcggcaataccaatgttgtcaaaaatgtggcggctgttgcataataaatatggcgcactgccctatgtttccattttgttgataatacaaatattacgcaaatcagcgccgaaagcactgcacatattgcaattacaaacggcaacagctttttaacattctgaaatctgcccgctaatgttccgaaaaacggcaattccagcgactgcttataaattttagccgcctcttttataaggtattccctgttttcgctcgaaacactgtcggcgcttatgcccttttgctctatataatcgtcaagcgctgtattaaacgcctgtttaaaagctgttttatcaatcacactgccctcgcccgaataataatcctgtatatacttttcagtatcatcgtgaatcattatttcatcaagcaagccgttgaaaaagtcctcttcaagtccgcttgcataaccgaggtcggtcaaactgcttgttatctcgtcctttttctcagttatgtaattgcaggtgttcatattgtcaagcataaagctgtcattaaacagtgtaaactgcaacgaaacagcatacgcaagcactgttaaaagcaccgcaagcacaagtgaaagcaatatattaactatctttttaactgttgacatattcagccctcctttgatgttttatcaatctgaggacctgaaacatattttgcatacacaaaaaatctctgatctgtaagaccaagctcgtcaaacggataacaggtatacattatgagattttcttcatttgcgtttaaatcatacgcagaggtgtctgtcgctttctttacagccgtatcggtaatttcgtatgtgtaattgccgtagcttgtcttaatggtaacagtctgccctgccttagcgtttttaagtccgttaaaatatgtattgttgtgtccggcaacaagaattgtttttccgtaacccggtataaaactgccgttatatatgcctacgccgtttcgcagcgcaacatttccgtcaccgaagaaaaggttattgtcaatagagcaatcctctatgataagttcgccgaactgctcacctgtctttgggtattggatttcacttataggcagttttttatttgaatcggtttcattttcgttttctgacaccggcacaaatatattgttatattctgtggaataatctcttgcagagtccgaaaacataagacctgctgccgaaattaaagaagatgacggcataagtacaaggtagcctaaaagataaattaccacaaaaaatatagagggaagaattaaaaaacccttcccaccaatttttttatgcctgtgtctggtatttttcatatcagacatttacaatcaagctctttctctttttttaacagaaagaacaactgtagcacctgctgcaagagcaactgctgcgcctgcaactgtagcaacagcgaatgtgtttacattagcgcctgttgtagcaatagcattgcttgtagttgttgtgttacccttactgtcagttgtaacctttgtgctaacaattgcgttgccgttcttgtcagtagcagaaacagtcttagttgccttgtcgtaagaaactgtaacaccgattacattagcagccttctgaccataagtgaagagctcctgcttctgatctttgttaagatccttaacagttgaagcaccctgtgacttaaggtaatctacagcatcattgatgtccgcaataatctccttagattctgcgtctgtcatgtcaatagtgttgaagtagttttcagcctggttgagcatctcatcagcattagtaacaaaaccaccgttgtagcttgtgtttacttctgaaagcttgtcaagtacagcctgttctgcgctgttgataccagcggcaaaagccggcacgctagccatagcaataactgttgctgatgcaaggattgcagataactttttcattatttataccgcctctctaaagtatttagcaaatcgttgaacaaaattatatatataaaattttgcccaattatctactttgaactatattttaacacaataattcttttttgtaaatactttacattaaattactgtcgaatcttagtttttttatttttttgcagtaaacaaagttgtttatcttgcttgtttttggtattattcacgaattttcttgtctgacatacattcaacaagaacagctttttgcgcatgaagtctgttttctgcctcttcaaagatttcattggcatgctcttcaaatacatcggcagtgatttcttcgccacggtgagcaggtaagcagtgaagaaccatacactccggatttgtaacagacataagctctttgtttacctgatagccggcaaatgcctgttcacggattttcttttcttcttcctgtcccatagaagcccaaacatctgtgtaaaccacatcggcattcttcgctgcctccatcgggtcttcaacaatttcaaatttgccgttgccgtactttttaccgaattcaataatgtgttcaggcggcatatatccctttgggcaagctgcagagaaagacatacctgtgctgagtgcgccgacaatgagagagttcatcatattgttgccgtcaccgataaagcacattttaagtccctcaagtttacccttgaactcacggatagtcataaggtcagcgagtacctgacaaggatggcagtagtctgtaagaccgttgataatcggaatagaaccgtgctctgcaagagcctcaacttcttcctgcttaaatgttctgatcataataccgtcaagaaaacgagagagaactcttgctgtatcctgaacaggctcgcctctgccgatctgtaaatcattggatgaaaggaagagcggataaccgccgagctgtgtcatacctacttcaaaagaaactcttgttcttgtgcttgacttctcaaaaatcataccaagtgttttgccggcaagaattttgtgctcaatgccgtgtttctgctcatatttaagctggtcagcaaggttaagtgtattgatgatttcatctgttgaccaatcttcaagtttaagtaaatgcttcattttaattctcctttaatgttttttcaagaatatcaagcgcaaggtcgatttctttttttgtaatgttaagcggcggcaacattcttaaaagtgactttgcggtaatgataataagtccgttttcaacgcattttgccgcaatgtcgtgtgcgtcgccgtctttaagctcaatgccaatcataagtcccattctgcgaacagcctttacgccgtccattttgaggactttttcttctatatatttaccctttgactcaacctcggagagaaactccggctttgaaattttatcaagcacatagtttgcacctgcgcaaacaacagggtttgcaccgaatgttgtgccgtgagtcgaaggtgacattacatcttttagtttttcgccgcaaacgcataagccgatcggaagtccgccgccaatgccctttgcaactgtgaaaatgtcaggttttacttcaaaattctggaaagcgaacagcttgcctgttctgcctgcacctgtctgtacctcgtcaacaataacaagaatatccttttcgttacagaacttaacaaggctctgaacatagtctttatcaaggatatttacaccgccctcgccctgaataagctcaagcataactgcgcaggttttgtctgttacggcattttcaagagcgttcatatcgttggcgtcaacatatgcgaatccctgtgtaaacgggaaaaagtagttgtggaacacatcttgtcctgtagccgaaagtgtggttactgttctgccgtggaaagaattgttgagtgtaataatctcattgcggtcagcaccgtacttatcaaagctgtattttctcgcaactttaatggcacattcattagcctccgcaccgctgtttccgaagcatacctttgaaaagcctgtaagtgtacagagtttttcggcaagattacttgcctgcgggcaataaaagtagtttgacatatgctgaattgtgtttgcttgttcgcttacggcttttacccagccgtcctcgcaccagccgaggctgtttacaccgatacccgatgcgacatcaacatattttttaccgtcctcgtcataagcagttgcacccttgccgctttttaaagctacattgtatctgccgtaggtgtgcattatgtactgcgaatctttttcctttgtattcatcataccaccccttaagtgttatctacatcttcgttattaaaggaaaaaacaaatatatcctcacgctttttaaatccgaaatcctgccagaagctctgacccgtggtgttgttctgatagcagaagatatgagttttatcaattccttggtctttaatcgctttgatagcgctttttgcaagttcgtgaccgattcggtttcttcggtaatcgggcagaaccgccatatggtgaataaatcctcgtctgccgtcatgacttgcaagtacagtacctacaattttaccgtcaattacggcaaccttgctcataccctcgcttcttgtcagataagattctatttttgctttttcgtcagccttggacaaggctctttttgaggtaatctgccagagggcaaatacttcttcgtagtcatcgattgtcatttctctgattatcatatctgtttttccttatcaactgcccgtaggcaaaatatttgcaaatctattaatagaacattgtgccgataccctcatcactgaacatttcaatgaggatagagtgttcaattctgccgtcaataatgtgtgctctgcttacgccgcttcttacagcctcaacacagcagtcaattttcggaatcataccgccctttatgatgccctcacgcttgagcataggaacttcgctgacatttacaacagatatgagcgagtcttcgtcgtttacatcttttaaaagacctctgatgtctgtcataagaatgagctttttggcaccgatttttgcggcgatgtgagctgcggcaatgtctgcgtttacattataaacatttccgtcataaccgcttgcaacggtagccacaatcggaatataaccgttgttgataacattctgcaaaggttccggatttacttctttaatctcgcctacatagccgaggtctgcacttgtaacaagtttttccgccataagcatattgccgtcaagaccgcaaagaccgattgcctttccgccgtgtttttccataagctgaacaaggtttttgtttaccttgcctgcaagtaccatctgcacaatgtcaatagtttcttcgtcggtaacacgcataccgttttcgaacttgctttctttgccgactgccttaagcattgcatttatttcagggccaccgccgtgaacaagcacaacattaacgcctacaaggcgcataagtgcaatatcgctcataacggcgcttttgagtttatcgtttatcattgcgttgccgccgtattttacaacaattgtttcaccgctgaatttacgaatatacggcatagcttgtattaagacttttgctcttttattaatatccatttttcatttcccctgatataaatttaatgcccgtttttcagataaattatggtttggcaaattactttgccaattaggttctgtagtcgccgttgatttttacataatcataggtgaggtcacagccgtaagcctcggcatagccaaaaccgtcatttaatgatacaagaatgttgatttccttttcaagcagaatttcctttgctttttcttccgaaaactcaacccctgcgccgtccttgcatacaagaatattgcctttggcggattcaaaagaaacatctacctttttaacatcaacatcagcgccgctgtaaccgattgcacacaatactctgccccagtttgcatctgagccgaacattgcggcttttacaaggcttgaaccgataatgctctttgcaactttaacagcgttgggcttgctcttagcaccctcaaccttgcaaacaagaagttttgttgcgccttcgccgtcacccgcaagtttctttgcaagtgctctgaaagctgcggtaagtccgcttaagaatgtatagtaatcttcgtttttgttggtaatcattctgttgcctgccttgcccgatgccataatagcaagggtatcgtttgtagatgtatcgccgtcaacgcttaccatattgtaactgtcctcaacagcctcacgcagagcctcacgcagcatatccgaagaaacagccgcatctgttgtaacaaaagagagcatagtacccatattaatgtgaatcataccgctgccctttgcaatgccgccgattgtaacggtcttgccgtcaagctccatctgcatagccatttctttttttaccgtatctgttgtcataatagcctcggctgcgtctgtgccgccctctttggtgaggtgacctttcatataaacgcaagcctttaaaataggctgaataggcagaggctgaccgataacacctgttgatgcaacgataacatcttccgcttttacaccgagagtttcgcctgcgataaggcacatatgatttgcaatgtcatatccgtttgcgttgcaggtgtttgcattgcctgaatttacgataacagcctgtgcaatgccgttttcgaggtgctttttggttacctcgatagccgaacttttaacaaggtttttagtataaacagccgccgcagtacagggagtgtcgcaataaatcagcgcaaggtcacgctttgttttatttgacggcttgattgacgcacaaataccggctgctgtaaagcccataggagaagtaactgtgccttcgataaatctgtagtttcccataataaagcctccgttttatagttttgcttaattattaattaaaaagcaggcggaacgattataaggcctgtcttttcgtcaagtccgaaaataatgttcatattctgaattgcctgacctgctgcacccttaaccatattgtcaatagctgcgcaagccacaagcttatttgctcttttatcgtgatgaattgaaacatcacagaagtttgaatagcgtacattgtgaatgtcggcgcatttgccgtcgtcaagaagtcttacaaaaaactcgtctttgtaaaaatcctcatacgcttttctgatttgctcaaaagtaacgccctcgttaatatccgcataaacagtggcaagaatacctctgtttacaggtaaaaggtgcggcacaaatgtgattgttacatcttcgcccgaaagttttgaaagtgtctgctcaatttcgggtgtgtggcggtggcaggctaccttataagcgtggaatccctcgttaagttcagggaagtgattgccttgtgtaggttttctgcctgcacctgttacgccgcttttgcagtcacagatgataccctttgtgcttacaagtccgtttgcgattgccggagcaatggcaagtggggaacaggtagtgtagcagcccgggtttgcaattaattttttacctttaattttatctctgaaaaattcaggaagtccgtaaacagactgttcgtgtaactttttgtcaagaaaagtaccgccgtaccactctgtatattcttcttcgctctcaagacggaagtctgcgccgaggtcaatgaaagccttgcctgcgcttatgcacttttcggcaagttcctgtgaaagaccgtggggaagtgcggcgaagataacatcgcttttctcaacaacagcgtcttggtcttcacagaccatatcgtttaaaaatgtatatgacggataaacatcgcttaacttctgaccttcaaaagaaaccgagctgatagctgaaatttcagcctcggggtgacttgtcagaagtcttacaagctcggcgccggcatagcctgttgcgcctacaatacctgcttttatcattttaatcaatcctttatgaatatatatctaacaattcttatactgatactaatagtctatatctaaatcaatccgccaaacattaactaaaacaaacaaataaaagtttgaagtttccaaaggtcactgacctttggtcgtctaaggaaaaaggattcttaagggaaaagggactcgaaatcccttttctcttgagcgtgctttcttttggagcttttcttttcacgcaaaagaaaagcggaattggcaggaggtttaatttaagacaaaaattgttttcaacaactgcatttataaaatcaattataaattcttagcaatttcagccacacgctttgcctgtgcctttacattttcagaggcagggccgccgaatgcttttctttcgtttgtacaagtttcaagtgaaattgctctgtaaacatcatcgttaaatacatcacaaacctttttgtactcctcaatcgggaggttttcaaggtctgtaccaagctcaatgcatcttgcaacgagttcgcctgttgccttgtatgcatctctgaacggtactccgttctttgtgagccagtctgcgcagtcggttgcgttaataaatccgcctgctgccgctttacgcatattctgcggaataactttcattgtgtcgagcattggagtaaaggctgtaaggcacattttaactgtatcaacagcatcaaaaattgcctctttgtcctcctgcatatctttattgtatgcaagggcaatgcctttcataattgtaagtaaggtcatattgtcgccgaaaactctgccgctcttgccacgtacgagttctgcgatgtcaggattctttttctgcggcataattgaagaacctgttgaaaaagcgtcgtcaagctcaatgaatttaaattcccagctgcaccacataatgatttcttctgaaaatcttgagaggtgcaccataataatagaaagaacagacgcgaactcaatgcagtaatctctgtcggatacaccgtcaagcgagttgtttgtaattctttcaaaaccgagcagctcggctgtaattgttctgtcgatagggtatgttgtgcctgctaaagcacaagagccgagcggcatttcgtccattctcttaaggcagtcctcaagtcttgacacatctcttaaaagcatttcgccgtaagctaaaaggtggtgaccgaaagtaatcggctgtgctctctgtaaatgagtgtagccgggcataacggtttcgctgtacttttccgccttgtcggcaataaccttgataaggtcaacaacgagctttttaacatttacaacttcctttttaaggtaaagtttaatgtcaacggctacctggtcgttacggcttcttgatgtgtgaagtcgcttgccgttgtcgccgattctttttgtaagctcgccctcaataaaggtgtgaatatcctctgcttccatatcaatatggagagtgccgttttctatgtctgcaaggattcccttaagaccctgaactatgtcgtcagcctcttcctgtttgataatgccgcatctgccgagcattgttgcgtgggcaatactgccctcgatatcctctttatacatacggctgtcaaatgagattgagctgttaaaatcgttagtggtttttgaaagttcctttttaaatctgcctttccaaagctgcatataatcacctcgggttaatgaatgattgttaatttgtgtattatttataattgatattgctgtttaaaaatatccgtataaacaactgtcagggacagagaatttccctgtccccgaaccggaataattattttaattcatacaaaagtctttgagtaaaaattacttaataagaccctttttagcacgaaccttgattggaagaccgaagaggttgatgaaacctgcactgtcattctgatcgtaaacctgatcctcgtcaaaggttgcgatttcttcatcatagagtgaatatgggcttgtaacgcctgcgtcaatgatgttgcccttgtaaagctttaacttaacatcacctgttacatactcctgtgtgctgtcaacgaatgccgagagagcctcacggagaggtgtgtaccatttgccgtcataaacgagttctgcaaatgtgtttgaaaggttcttcttgtagtgaagtgtatccttgtcaaggcagatttcctcaagcttgttgtgagctgcatagaggattgtgccgcccggtgtttcataaaccccacgagccttcatacctacaagacggttttcaacgatatctgtgatacctacgccgtttctgccgccgattttgttaagctctttaataagctcaacagagtcgatttcttcgccgttaagttttgtaggaacgcccttttcaaatgaaattgtaacatactctgccttgtcgggagcctgctcaggagaaacgccgagttcaaggaaaccttccttgttgtacataggctcatttgcaggatcttcaaggtcaagaccttcgtggcttaagtgccagaggtttttatccttagaatagtttgtttcacggttaatcttgagcggaatgttgtgcttttcagcgtactcgatttcgtcctcacggctcttgaattcccaagttctccaaggagcgataatcttcatatccggagcataagccttgatagcaagttcaaaacgaacctggtcgttacccttacctgtgcagccgtgacagatagcgtcagcgccctcggctttagcgatttctacaagtcttttagcaatgataggacgggcaaatgatgtaccgaggaggtatttgccctcgtaaacagcgcctgctttaactgtaggaatgatgtactcgtcaacaaactcctttttaaggtcttcaatataaagtttagatgcgcctgtcttaatagccttttcctcaagaccgtcaagctctgtgccctgtcctacatcacccgaaacagcgataacctcgcagttgtcatagttttcttttaaccaaggaataataatagaagtatcaagtccgcctgaataagcgagaacaacttttttaattttattgtcagccattttaatttcctccatagaaatgatttatattactcttacattatacgctttctgacggaaaaatcaagtgttttttgaataattattcaatacaccgtaaaattgtgataaatgcacttaattctaaataaaacccaaggtttttacagcaaaatcaaccttgatttcaacataaatcttcaatatatgtataaaaatgcatatatgcagaaataatgaatattcattttttgcgcttgattttgcataaaatgtatattttaatgaatattcaatgcagatattcattttggcttgcggcaaagcaaaaaataaacagccgattggatatttaatcaaagtaaaacaggtcttaaaattttttgtccaatgaaatgcataaaatcagagcaagttttattgtcaactttattatacatatgctaagtaaacttgttaatagattttttgatttatttatatcactaaatacaagcaagtaaaaaagcccgactgtttttacatagtcgggcaagtattataaaatatcaagatttcttttccaaattaaaattctttttacagactcgtcgagtctgtctgctgtaatttctccgctttgtacggcattaagcaatgcggtatattcgctttcaatatcgccgcaacagaggaagtcattgcctgctttaaaagcgacaaccgagagtggttcgtaaatgtcaagggcgtcaacggcaaacatatcgaggtcatcggtcataacaactccgtcaaatttaagcgtatctcttataacctcatgcacaggctcagagagcgaggcgggattttcgctgtcaatcgaatttactgttacgtgcgacacaagaatactgtctgcgcctgcggctatacctgcctgaaacggcagaaaatcattgttctgcaagtccgagaaagttctgctgtcagtagcgctggaataatgtgtgtcgccgttatctccgtatccggggaagtgctttaatacagtgccgagttttttctctttgcttgcttttacaaccgtatccacaaatctgcttgtgcttgcggcgtcacttgaaaacgacctgtaatacataaatgaatcggggttggaagtgatgtcgcagacaggcgccatatttacatttacgccgagcgaaagcagaaattccgctttatcgtatgcgtcgtcttcaatagcgctccaaccgccgttgttaaatgtatcgctcggtgaaaggtatgcgctgtcccttaggtttggattatcgctcgctcttacaaccgttccgccctcttcgtctgtgccgataataagcggaattttggcattggactgcatagcttttatatcggcattcacttcttcttttgtcttgccgtcaaaatctacgccgaacagcaaaacgccgccgatgtggtattcgtttattgcgtcgctcatatcattgccacgacaatttacataaaacagctgtccgactttttcttcaaccgtcatttttgaaatcatatcgtcaatgtctgaatatgtgtcgggaggagcggtggtttctgtcactgctgcctgactgttttgctcgtcatttgtcgactgcgcttttgaagcttcgctcgtgttctgacagcctgcaagcactgttgccaacattgctgcggtgagaagtgatgtaattgttcttttgattttcattttatccctcatttaaaaatttcgacagtcgtattttctacaaatctgtccttaaaagttttcatcttttgcatatgcggtgtgttaagatgttctttttgcaatttttcggactgccatttttcaataagcagtacctcattgctttttccgaatgacggcacaaagtaatcgtattttatacagccgttttcattttgtacaatctgcggaaagccctcgtttttaagagctgtcaaaaagtcattaaccataccgtttttaacggaatattttacgataagcgtgatttctttcattttatctccttgtcggcctttttaagtgttttgtaagtttcaaaataaaagaatttgtctgtatatgtacctattataccaacgactttgcccattgtaaaggctgcaagtacagttcctatgctaagtccgtcaaggtagccgaggcagaagaaagtaagcgcagcggttataaaaatcttccgatataacaaattattatgcacactgacagcctgctgtcagtgtgcataaaacaaaatttgaaaaaacaggcggtagccgttgtaaccgaaaatgcccaaaatataggcaacgcattgcgttgcctatgaaggttaagtatgttttcttttattgctctcgcattgacttccgcccagtcgttcaagccgccaaacagcaagctgtttggctatcgttagattgcataaacggaaagtatttgtgggctttgcccacacccacaacctttgaaaaggttgaccaaacttttataatactttgcaaaattattttgttaaactttaattatcgttttgctattgcttgctgtaaggtggtaacatcccttacatcacggtgaccgtcaaagtttgtatctgtgtaataatactggagcgaatcaagctcaaccgatccggaaatgtactgttgcagaaaagtaacatcgtttacatctactgtgccttgaaggtcaatattgccgaatctcaatatgtatatattcgaaccggaagtaccgcctccgccgccgactacataagctttgcggtaagaaaatgtagtgcagtaatctgttggttcattaattttagtagacagataaatttccacgcagccgtccttatccggaactacgcccgttacagcgccgccgctctgaaagtacaaggcggagtcataataaccgccgccgtctgctttttcgtatttgaacttataatcatgactgccgatacttgagtattccattgtatgcgagccgtccttgttaaaataattcggagctaactcgtgaagatttatttttgctttaacataccttccgcctttattgtcaaatgtgtaacttgcgtatgtgtttcccgaaccgcttacaaaatagcgggcatatttttcggaagacggcataaagagtgttttgtcaccgcctatacaatcggcaaatttcattgagtagtttttttgagtatcgcctcccgtaaataatactccgtttgtataatcggacggaatattgtacgcagaaaccaaaagcgtgttgttgccgatgttttttgccgagttgtaaatcttaacacccttatgcggcttaacggtttttgcgtttgcggtcactgctgcacctgcagtcagcaccgcacaaagaattaaacatacaaatttttccattttatactcctttataattatttggtaatagcttgttgtaagtctgtaacatctttaacatttgttttactgtcacggtttatgtcggaataaaacatctgaagtttatcaaattccgcatcgcccgcaaggtatctctgcaaaagggttacatcgtttacatttgtactgcctttaaggtcaatattgccaaaacaaagcatcggcacatacatacttattattccgctgtaattaggcaggtaggttgaaaatgcggttttcacaccgggttttgcttttatataaatttccacacagccgttctcgtcgggtgcaacaccgtttaccgcaccgccgctaaagaaagtgagattggatccattttccctaagagtgtaggttgctccgtttccgtctgtatcggtatatgaaccgtcactgttaaaatagcttgaaacatcgcttaattttacctttagttttgcatattcgccgcctgtattcgcaaaggaatagcctgcataagtatttccggtgctaccgccgtttgccgaaacaaagcgagtatagctttcgcttgacggcatggaaataacggtatttttacctatacaatccttgtattgtacagcatatggttttcctgtgtttttgccgtaaaaacacactccaccaagcgtatttttgctaagattataagtaaacacatttaaggtgttgttttcaagttttacccctgaatcaagcacctgaacgctcttattctcccgaacaactgccgcattggcagaaactattgagcatgttgccataacagctgcaagtgctgtacttaaaagttttttcattgatttcctcctcgctttaaaactaaattaaaattaatatccatagtattcggcaacggctgtctgcaaagcggtaacatcctgaacatttattttgccgtcacgattaatgtcggcatggtacatttgcagagaatcaaactctgcattgcccgaaaggtactgctggagcaatgacgcatcgtttacatttacgctgtaatctaaatttatattgccaaaagtaagcttatatatctctctgccgtttgttccgccgccaccgccgcttgtcagccccacatcaaggccgtattctgtaaagtaattcacactatggtttacctttgtactcacataaaattccacatatccgttgctgtcgggaactgcaccggtaaaaactccgccgctctggaaaaacaaaacagattcatagtagccgtcctttaccgtttgacgagtaaaattatatgtatgtccgtcttgggtgtgtgtgccgttacttttaaattcatttggatttatatccgacagcttggctcttaccttaacatattctccgcctgcctgtcttaaatccaaattagtagttccgcccatactgcttgaaagacaagtccaaatattatatttttcgttagacggcatagttattgttttgggtgccgataaataattcttaaatatatatttgtatctttttccgcttttttgaccgtcaagtacaaatccgccgtctgagcctgtattcttcatattgtatgtgtaaatacttatagtgttgtttttagttgttatttttgaactcaaaatttgataatccttattttgttttaccgctgcgttggcagataccgctccacctgccgccattaaagcaacaagtgcgatactgattaattttttcattatttatcccctcaatataaaatttttgtaaaataataaatattacatacagtcaagtaatattatacaatattttaaaagataaagctataacgcaaaaagccgaatttttaattcgcttatagaaaagttactgcactttgcacatacaactctgttttaacttgttatcacaaagaatttatgctattattctaataatgaaaggcggtaataatatgttgaatttctgctgtcctgtctgcaaagaagaattaaaacttgacggtcgaacctacagatgtataaataaccattgttttgactgtgcaaagcagggttatgtcaatcttttgcagagcaacaaatccaaaagcaagcgtcacggtgacgataaacttatgatagaggcaaggaccgagtttttaaatacagattcgtacaagccgctgtgtgaccttatgtgcgaacttttgcaaaaatatattccacaaaatgcctgtgtgcttgatgccggctgcggcgactgctattatacaggaaaaattgaaaaagctcttgcagacaaaaacgcaagtatagcgggtattgatatttcaaaatttgctcttattgcagcggcaaaacgcagtaaaaatattcgtttggctgtagcaagcgtatttgctttgccgacagcggatttttcctgcgatgcggtgcttaatgtattttcaccttttgcgccggaagagtacaaccgagttttaaaaagggacggagtgcttttgcgtgtaattccgcttgaaaatcaccttttttctctcaaaaaggcggtatatgacaatccgttaaaaaatccgaaagaaaacaccgatattgacgggtttattcttgccgaaagcaaagaacttaaatacagcataacgcttgatgataacagagaaattgaaagcctgttcaaaatgactccgtactactacaaaacatctcgtaccgaccaacaaaagctggagaaattaaactcacttacgaccgaaatcgaattttgcgtgcttgtctataaaaagctgtaa

SEQ ID NO: 52 - DNA, 7526 bp, unidentified
  source 1..7526: mol_type = unassigned DNA
atgaagggaaaacatagaattattgtatcaacaaagcgcttaaaatatgattttgaaattcgaagaaatctgacggtcatccggggagacagtgcgacaggcaaaaccacattggtagatatgattcgggaatacgtaaataatccatccggtacgcccgtggaactgacgtgtgacaaaaaatgttatgtgctcgaaggttcactgtggaaagaacagttatcagcaatgcaggatagtattgtatttattgatgaaggaaacgaatttatcaagacagtagaattcgcagatactattcagaaaacagataattattatgtcattgtttccagggaatccttgccttctttgccgtatagtgtggaggaaatctatggaattcgtacttcaggaaaatacggaacattaaaaccgtgttatcatgagttttacagaatatatggagcacagactttaaagaaggatattaaaccagaggttgtaataacggaagacagtaattccggttatcagttttttaattctgtatgtaggcaacagcaattgaaatgtgagacaatgaatggaaagtcaaatgttttccattatttaaatatgcataaaaatgaacgcatacttgtaattgcagacggtgcggcatttggttctgaaattgacagagtgatgcagttgatgggtggaaaagatcaagtggtgctttatttgccggagtcatttgaatggctgatattaaaggcaaaagtagtaaaaagcaaatgggcagatcaggtgctggaaaagccgtgggaatatgtggaaagcaaaacatattttagctgggagcggttttttacggcagttttgattgaagagacaaatggttcttaccttgcatatgcaaaaagaaaattaaatccagcatatctgaacgattctgtcaaagattccatactggaacagatgacaaaaattaaattgttttagggaaaaagtgtgataaaatagcagaagatgtgattttttctgcaaaggagtaagagacaatgttaaaaggaaaatgtgtggtactcggcgtgaccggaagtatcgctgcctataaaatcgcctatctggcaagtgcgctcgtcaagcagcatgcggatgtgcatgtgatcatgacggaaaatgcaaccaattttattaatcctatcacgtttgagacgctcacaagcaacaagtgtctggtcgatacgtttgaccggaatttccagttcaatgtcgagcatgtggcactggcaaagcgtgcggatatttttatggtagcaccggcttctgccaatgtaattggcaagatggcaaacggaatcgcagatgatatgctgacaacaacgattcttgcggcaaaatgcccgaagtatgtttcccctgccatgaataccaatatgtttgaaaatccgatcgtacaggataacatcaaaaagctggagcattatgggtttcatatcattgatccggcgagtggttatcttgcctgcggggataccggagccgggaaaatgccggagccggaaacactgttttcttatattatgaaagatcttgcctgtgaaaaggatatggtcggaaaaaaagtaatggtcacagcaggaccgacacaggagaagattgatccagtgcgttatattacgaatcactctaccggaaaaatgggctatgcaattgcgggaaactgtatgcgccgtggcgcggaagtgacactgatcacgggaccggtggcaatcactccgccgccgtttgtaaaggtcgttccggttgtatctgccgcagatatggcggcagccgtaaaggagacagcagagcaacaggatattattatcaaagcggcagctgtggcggattatcgtccagatcacccggtcgatgagaaagtcaagaaaaaagacggggatgccactcttacgatggaacgcacggaagatatcctttcgtatctgggcgcgcacaaaaaaccgggacagtttctgtgtggattttccatggagacggaacatatgctggagaattcccgtgcaaaacttgcaaaaaagaatgcagatatgattgtggcgaataacctgaaagtagccggagccggatttggtacagataccaatgttgtgacgctgattacggcagatgactgcagggaactggaaataatgagcaaagcggatgtcgcatcagcgattgtgagtgaaattttaaagaaaatgtgttagtattaaaatatgacagacttagaagcctattataataaatttaatgaagagaagcgtctggacagccgacacggcagggtggaatttgtgacaagcatgcattatatccatcagtgtctggatgaaattgtgaaagaacgtgcaaaagaggaaatccatatccttgatatcggggcgggaaccggacgatacagcgtaccgctggcacaggaagggttcgatgtgacggccgtggaactggtgaagcataatctggggcgtctgaaacagaagggggcaggcgtgcatgcatatcagggaaatgcaatgaatctgaaaaaattttccgatgattcctttgacgtaaccctgttgtttggaccgatgtatcatctgcatgaggaaaaggacaagcttgctgcgctgcgggaggcagtgagggtgacaaaacccggaggcaggattctcgtggcatatattatgaatgaattttccgttatcacgtatgcgtttaaggaaaaacatattctggaggcgcttcaggagggaatgctcacagaggattatcactgtacttcaaaagccaatcctctgtattccatggttcgtctggaagatattgaagcattggaccggcaggtagaggtcaggcgccggcagatcatagcggcagacggtgcagcaaattatatgcgtccgtttttaaatgcgctgacggaagaagagtttgatgcgtttctgcagtatcatctggcaacctgtgaacggatggatcttatgggtgcaagcggtcacacggtggatattcttgtgaaagaggagtctgaaaacgtatgaaaaaatggatattgccaatcctaatggcaggatttttgctgacgggatgttcttctcctgcagcaacgtcatcggctttgccctcttctacggaaaaaatcacggagacacagatgacggaagaaccgggtacgctggaagaaacggaaaccgggactgcaactgaaacgcagcaggaaccggtgatacagacggtaaaaattacggcgacaggtgactgtacgcttggggcaacacagacgcatgggtatgcaggttcctttcatgaatactatgataaatacgggcaggattatttttttaaaaatatcagaagtatttttgagcaggatgattttacactgatcaatctggaatgtgtgttgtcaaatgcgaccgagcgtgtggaaaaaacgtggaacttaaaaggaaaaccggagtatgttggtattatgacagacagttctgtggagggggcaagtctgggaaataatcatacgtttgattatgggcagcagggacttgatgataccagagaagtgttaaataaagcagggattatcttcggattcaatgatcatgtggatacctataccacgaaggatggtatcaaaatcggaattgtctccgcaagccagctgtccgctgatgaaacacatgccaattatatccgggatgggattgcagaacttcgggaagaaggagcggatctggtaattgcctgttgccactgggggatagagggggatcattatccgaatgattatcagcagaagctggcacaccaggtgattgactggggagcagatctgctggtcggtacacatcctcatgtattgcagggaatggaattatacaacggaaaaatgatctgctacagtcttggaaatttctgctttggggggaacaggaatccaaaagacaaagatacggcgatctatgaacagacctttacctttgtggatggggtactgcagacagatatatcagccgatatgataccatgcagcatttcttccacatcagaaagaaataattttcagcctgccatagcaaaaggcgacagaaaacagacgattattgatcatatgaatgagtattcggaaaagtacagtaaaatcggatttgacgcaaatggcagggtaatcatcagggaagagtagggggatactataattttatgtggcaagtaaataataatgataagaggaatcagcacatgaatgcaagtttttggaattatccgtcaaaacagaaaagctggccgatagacgaagaaatggaaagtctcggggaagtcattcatccactcgataatatcggtggatttgatgtacgtccgggattttatcagatgaatggtgcatatcagacagaggaaggggtaagttttaccgtaagctcccatggagctacgagctgtgtcctgctgttattccggccggcggcacaggaaccgtatgcaagaatccgcattccggaaagttataaaattggaaatacgtattctatccttgtttttggcttaaaagcagaggattttgagtatgcctatcagatggacggtcctgccgatcaggcgagagggttactgtttaacagaaaacatacgcttcttgatccatatgcgaaagctgttaccggtcagagaaactggggagaaaaaccggaaggcggaaaggattttgtctataaagcccgtgtggtgcaaagtgattttgactgggggcggtatcggaatctgaattacaaatttgaagatctggtgatctatgagatgcatgtcaggggatttaccaaagatgcgtcctccggtgtaaaaggtgggggaacatttgaaggtctgcgacagaaaattccgtatttgaaagatctgggaatcaatgcggtagaactcatgccgatttttgaatttgatgaaatggaaagtgcccgtgtggtggatggcgtgcagttgtacaattactggggctataatacggtttccttttttgccccgaatacaagttatgcatttcatcaggagcataatcatgagggtgatgaattaaagcgtctgatccgcgaactgaaagaaaatggaattgaagtcattcttgatgtggtattcaaccatacggcagagggaaatgaagacggtccatgtttttgctttaaggggattgataacaatatttattatatgcttacaccggatggatattattataatttcagcggctgtggcaatgtcttaaactgcaaccatccggtggttcggaggtttattacggattgtctgcggcactgggcagtagagtaccgtgtggatggattccggtttgatctggcatcgattctgggaagagatcagaatggtgcaccgatggagaatccgccgattctggaagcccttgcatttgactctattctgggggatatgaagctgatcgcagaagcctgggatgcgggtggcttgtatcaggttggaagttttccgtcatggaaccgctgggccgaatggaacggaagataccgtgatgatatgagaagctttttaaagggcgacagtggcgtcgcagggcgtgcaattacacgtatcaccggatcctccgacatgtatgatccggcaagccgcggatatagtgcatccgtcaattttctgacctgtcatgatgggttcacgttgtatgatctgtattcatataatgaaaagcataatgagaaaaacggatggaacaatacggacggggataacaacggcctgagctggaactgcggggtggaaggtgagacggatgatccggcggttatgagcctgcgacgcagactcgtgaagaatgcatttgccgcgttgttatgcagccgtggaccggctatgttttttgcaggggatgaattttgtaatacgcagtatggaaataacaacgcatactgccaggataatattatttcctggctggactggaacagactggaagaatttcaggagattcatgattttgcccgttttatgatccatttccgtgcaaagcatccgattctgcgaagggatacaaagccggcagtctgcgggttaccttccgtaagtatccataacggagagccgaaccggaattatacggactataatacacatttaattggaatcatgtatgcgggaagaaatgccgatgatacggatgatgatatgatcttttacggaatgaatgcgtattgggagcctttggagatgcgcctgccttcgttgccggagtcttatcattggaaacttgtagtaaatactttctgtgaataccaggatggggcagattttgaagctcagacacagggagatcagacacgtgtgcgtgttccggaacgttctacggtaattttactggcagaacatgatttataaaaaaagagttgagcaccgctctggaaacagggcgtgctcaactctttttttcggtggtatcgggtctggttgtaatttcactggttccgatgaggtaatctgcagaaacattcagaatctgcacgatggctgcaagatccgcaacggtcggagaacgacgaccggtacggtatccgctgatcgtggacggcgaaacaaacattgcatttgccagctggatattggaaatattttgtttatacataatcagactcagacggtcaccaaaatctttgtatttatttttatcattcgttttcatacaaatgattttatagaaagttgatataaaaaacagagaaaacgcgtattgcgttttaattcttaaataaatggaaaaagatttccaaaaagataagaaattaaatccatccgccgtctaaggtgagaatctgtccattcaggtaactgcttgctgtggcaagagaatatgccagtgaagcaacttcttccggggatcccatccggccggcaggaatttcttcgatgagtgcagagcgttcttcctcggagaaacaacggttcatatccgtatcgattaccccacaggcgatggcatttacctggatattgctaggggcaagttctttgcccaaagcgcgtgtaagggaattgatcccgcctttgcatgcagaataggcaacttcgcaggaagctccgacatttccccatacagaagaaatattgatgatatgtccggatttggcatgaaccatggaggggatgacctgtctgcatgtggaaaagacggatgtgaggtttgtcgcaactattcggttccagtcggtaatatccatgtcggttagcagaccgatataagagatgccggcattgttgattaacacatcaatctggccgaaggtatccagtgttttttgcaccatgtcacagataaaagtatagtctcctacatcaccacggaagcaaagcacctgtatggagcaggttgtttcaagttttgtggcaagtgcctgcagcgtttcataagagttatggcagcaaagagccagatgatagccttcagcggcaaatcgacatgccagggctgcaccgattccacgggatgcacctgtaatcaaagcagtatgtttcat

SEQ ID NO: 53 - DNA, 5602 bp, unidentified
  source 1..5602: mol_type = unassigned DNA
tcacagcaatttgatcctcaaatctcccagcagcgacactgcctccggcagggagaattttgcgtcctgcagcttgcagccgaaaatgtcgactttatacccgctggcctctttgaagtttgccttgcgcatatcgcactggaaaaactcggtgtccagcaggtcgcatttctcaaaatccgcgctgacgagattgcacttggcgaacatcgagcgctgtatgacactgcccgcaaatttgaactttgtcaggttcatttcggtgaaggtgttgtatttcaggcggcagtcccgcaggctctcgatggggtcggcaaatgcgccgtcgccctgaagggacatccagtcgatgttgttcagcgtacagttctcaaaatctgtgaattttgcgcgtgacatagtggtttttaaattagtgaccgtgcagcgcaggaactgacattcggtcaggacgctgtggtcgagcttgcagtcctcaaacgtgcagtcggcaaaaacgcagtccgaaaagtcgcagtcgtaaaacgtttccccggtgaaggtcaggcgctcaaagcgttcgccctcgtggtattcggcacgcatcaaatcaccagcccgccgttgacaccgagcacctgccccgtgatgtagccgctggcctcgtcagcgagaaagaccatcgtgcgggcgatctcgtccggctcaccgaggcgctccacaggggtctcctccgccagcgcggcgcggtcctcatcggtaaagccggccatcatgtcggtgttgatgacaccgggcgcaatgacgttgaccgtgatgccgctggggccttcctccttggcaagggccttgccaaggccgatgagccctgccttggccgcgctgtaggcgacctcgcagctgccgccggtctggccccacatgctgctgacaagcaggatgcggccgtatttgcggtggatcatgccgggcagcaccgcgcggcaggcgtagaacgcgccgtccagatcgacggccatcatccgccgccagtcctcgtcggtggtgtcggtgaacagcttgacctgcgcgatgcccgcattgcagacgagcacctgcagactgccgagttcctgctcggcccgggcaacggcggcgcgcacctgggcggggtcgcccgcgtcggcccggatggcaagatagaggccgccggggttgatttcttcggcctgacggcgcacggcgtcggcggcatcggggtgggaattgtacgtaaaggcgacgttatagcctgcccgggcaaaggccatcaccgccgccgcaccgatgccgcggctgccgccggtgatgaaaacgttatttgtcatggtaaaacctcaattcattgcccacttgcttgcctccctctgggagggaggtgccccgaaggggcggagggagagagccttgccatggcccgaaatatttcggatgaccgcaaggctctctcccccaccgcctgcgggcggagccccctcccagagggggccaaggaaaaaggcgctatttctttttgcgtttttcccgcagcatcacaaaaaaattctgcagcagggcctgcgcctcgtcctccagcaggcccgattctatgacaggatggtggttgaacggcagggcgaacagatcggtcaggctgccgcaacagcccgccttggggtcgcgtgcgccgtagacgacccgctttaaacggctgttgatgatggctccgctgcacatcgggcagggctcgagcgtaacgaacagctcacactgccacagccgccagccgcccagcgccttgcaggccgcgtcaatcgccatcagctcagcgtggtaggtggcatttttgccgctctcccgcaggttgtgggcgcgggcgacgatctcgccgtccttcgcgaccaccgcgccgacgggaacctcgccgagggcggcggcgatctttgcctcgtccagcgcggcacgcatcagttcttcatcggtcatactatcccctcaatgtacaaaaatggcggcgtaggccacgagaaacagcaccgttgcgcagtagaccgggctggtaaaaacggtcagcacatccacgccggggcgcagtcccgccgaaaagctgaacccctgacggcgggcgttgcagatcatccatgcgccgaacgccgggaagaacagcaaaatgaacagctccacaccgaaggagacctccgccggggcgtaataccgcagatagatcgttaaaaatgccagcgcgttgttgacaaggtgcagcagcattcccggcaggatgctgcccgagcgctcggccagccagcccaaaaacacgccgcaggcaaaggccgtcaggccctgcgcaaggtcgagatgcagcacaccgaacagcagcgccggggcaaagatagccgccgcgctgccgcaggggcgcatcaagccctgaaacgcaccgcggaacagcagttcctccgcgatggcgggcatgacgcagagcgccagaaactgcatgagcagctccggcccgccgctgggcagcatttcactggtcgcggggctgcctgtcaggcggttgatgagtgcgcccgccagattggcaaggttcgccacgccgagaaaaaccggcaggcagaagccggggctccacggtgcgggcagcatgatccgcaggtctttggttttcagccgcgtgacctttaacagaaaaaccagcgtcagcacgatggcccccagcccgatgagcagctgaaacagcgccgtgctgaccccgctgaagcccagcggcttggccagactggcaccggggtgggccagccccatcagtgcgctgaccagcagcgtgagcaggccgcgcaccagaagatataccagggatgccaccgcgcagccgcctgccgcgccccgcaccccgcgagattttgtcatgattttttatcctccatataaaggcttccccctccggggaaggctttattatcatcataccacaatccggccaataaaaaaagccccaccggtgtgcgggccggcagggcaaggttggagggagaggagtctattcattacctgcgttgtgcgccgcaggcattgactttctgttactataatagtacagtataggcatgaagtaaagctacactttttcatacatcacatgaatttttttcaccacaggagatgcagctcatgacactgacagactgccagctgttaagcattgtagcacagctgggtacctttgccgccgcggcggagcggctgcacatcacgccgtccgccgtcagccacgcggtatcgggcgtggaggccgagtgcggctttccactgttcacccgcaccaaaagcggcgtcacgctgaccgccgccgccgaaaagctcatgcccgccattcagcagatgctcgccagcagcgagtcgcttgaccagtcgattgcccagatcaacgggatgcacaagggtgcactgcggctgggggtgttcaactcggcctgcgtgacctggctgcccaagatcgtgccgggcttccgcgcagcgtttccgggcatcgacgtgcagatttaccaggggtcgtatgacgacatcacgggctggctgaaaaccggcgcggtggagctggggttcctctccaactccagcgcccacgatctggattttgagccgctctatgatgaccggctcatctgcatcgcgccgcccgactaccagccgcgccgccccggcgtggtgcgggccgaggagctgcgcagccagccgttcgtcagccagcagtccgacgtggatgccgacatccagagctactttaaaaagaacgacctgcatgtgtcgagccggtgctacatcgtggatgaccagagcatgatcgcaatggtcgcctgcgggcagggactggcgctgatgcccgagctgatgttcaaggagggcgcagccagcgcggggtgccaggttttgcagctggagcctgccgccaagcgcacgattggtctggcgtgcctgtcgcggacagcgctttcccccgccgcccgggaatttgtggagcacgcccgggcgtttgcaaggaagcggtgacccacgcggtaacggcctgaacccttccggcctgcttcgcggccacctcccctgatggggaggcttttctcgcgggctttgcccgcgcaaaaggctcctcgccatgcggggagctggccgagcttgcgaggcctgaggggctttgccgggctttgcgtcaacgcctgttaccgagccgccgcgtcaacttccacggcggccagagggctggccgccctacatgtgtcccggaaatatttcattgcgcagtgcagcaaaacacccccgtgccgttaaatcggcacaggggtgtttttacttagtttccctcatcgtactccgctacgggcacattcgcgtactcgtcggggaggtcggggggcagggtctgcatgtactcgtgcatagcctcggccacgttcttgctgtaggcgacggcctcgacgacggtgcgcgcacccttgacggcatcgccgctggcaaagatgccggggatgctcgtgcggcccacctcgtcggtctcaaacaggccgcgcggggtggttttcagattcttcgtgctgtcggtgatcgtcgtgcaggggccctggctgatggacacaatgacactgtccgccgggtagagcttttcggtgccgggaatctcggtcagcgtgccgtcctcggcctcgttcaggtcgataaagacgacgcccttgtcggtgatctccaacggctttttgttaaagatgaagttcacgccctccagcttggcatagcttgcctcgtactcgctggccgtaatgtggctggacagcgagaagcactcgagatgccgcgtgccgtggcggatggcggtgcgcgccacgtccatggccgcgttgcccgcgccgatgacgatgacccgattgcccaggtggtagacatcggggttctgcagatagttgatggcgtagtgcacgttgccgaggctctcgcccttgatgtgcagcgtgttgggccgccagacgccggtgccgatgaagatggctttgtagccgtcgcggaacagatcctcaattttcagcgccttgcccacgtcggtgttggggcggaccttgatgccctttaagcgcagatggcggtactcgaaatcgtccagcacggtcttgggcaggcggaactccgggatgccgtagcgcagcacgccgccgatcttatcgtggctctcaaagatcgtgacgtcgtagccgtagcgtgccaggatgaccgcaatggtcaggcccgccgggccggagccgatgatggcggcctttttgccgttggacggcgcgggaccctgggtcatttggctggcgtaggtggacgagatgtagttctcgatgaccgagaagtgcaccggcgcacctttgatgccgcgcacgcaatggccctcgcactgattttcgtggttgcagaccagcgagcagaccgtcgtcagggggttgttctcaaacagcatacggcccgcttcgtcgagcttattggccttcaaaaggcggatgacctcgggaatattggtgtggatcgggcagccctgctggcagcggggcaccttacagccaaggcagtggtttgcttcgtccattacgtgcagcgccat

SEQ ID NO: 54 - DNA, 12131 bp, unidentified
  source 1..12131: mol_type = unassigned DNA
tcagccattgtaaacctccaaaattttctgttcaaatttttctctgcctactctgtcgattgtaaacttaaatcgttcgctcggctttgcgttttctgcaaagaagttaagagcggcatcacagatttccataagtttttctttattttcaataaacggaataattgttttacccttgttgattgagttgccgaaaagtccgccgaatgaaacaatgtagccgtgaattgtgtcccacgcatctgtcgggcaagccttgaagcatctgccgcagtagttacactttgaattgtcaacggaaatttttccgtcctcaagagtgattgcaccctgacggcaggcctttacgcagactccgcagccgatacaagcgtcctctttccatgaaaccttgattccgcccttgataccgacatcgttttcctcagctttaaggcagttgttctgacagcctgttatgccgaacttgaacttgtgcggaagttcctttgcaaaatatctgtcgtcaagctcctttgcaagagcgtatgtatcaatacaaccgctgggacagattgcctcaccctgacaggctgtaattgttcttactctcggaccgcaaacgcccggctcaacatcgccctcggcaagtgcgtccttaactgcctcaacatcatcaagctttacaaaaggaatttcaacactttgtcttgatgtgaggtgaacataaccgtcaccgtagttttccgaaacctcggcaattttcgcaagctgtttagctgtgaggttgccgcctacaactctgagcctgagcgaaaaattatttttctgtttttgacgcataaagccgccctttttaagcgtagcataatcaactgccatttctcttactcctccgattcattcacatttatactgtctacagcctgtttgaagtcagactttaaatcctcaatatcttcaatgccgacgctgattcttattgtatcatcaaacacgcctgcgtttcttttttgttcttctgttccgtgagcgtaaattgtgcttgacggatgaattacaagtgttcttgtgtcgcctatatttgttgcatttgttgcatacttcaaattgttgataagcttaaacgctctttctttacttcctgccctgattgtgaggattgcaccgccttttcccttcaacagctttttacaaaggctgtaataaggagaagcttcaagagcgggatagttgacttcgattccgtcctgtgtttcaaagaactttgcaagctccaaagcgttataacaaagacgctccatacgaagtccgagtgtttcaagtccaacagagttcataaaagcattaaacggtgcaaggcaacagcctatgtttcgccagataccgtttctcagctttgcaacatacgcaagccgaccgaattttttgtactctgcaagacctttgtatctttccgtattccattcaaaattgccgctgtcaacgattattccgctgattgaatttccgccgccgttaatgtactttgacgaggaatgaacaacgatgtccgcaccgtgttcaaacggctgaataagatacggagttgccgttgtgctgtcgataatgagcggaacaccgtgtgaatgaacaagctctgatacagcgtcaagatcggcaatttcaagtccgggattgccgataagctcggcaaagactgcttttgttttttcgtttatgagcggttcaatctcctcggctgtcaccttgttgacatatcgtgtaacaattccgaaaggctcaagatctccaaacaaatcaattgttccgccaaaaagacctgcgcttgcgattacttcgtcacctgattcaagaatgttcaggagtgccatcgtaacggctgccatacctgacgaacacgcaaccgcaccgacaccgttttcaatggaagcaattctgttctcaaaagatgttaccgtgggattgcctattcgagagtaggcgtagccgggagctctgttgttgaacaccttttcaagctgttcggcagagctgtgcgaaaatgcactgacctgataaatgggagttaaggttgagccaaaaaccttttcaccgttaaaacccttgtgaagtaatgcggtgttaaactccataatatcaccaaccccttaatttcatacaaccaacccttttgtgtaagaccgtcgtaagaatttgtctgacggcttcgattgatataggtagattatactccattaatcatagtatttcaataggtttaataagattttacctcttgcacaatttttctttaaaatttgccgtaattccattatttcctacaatgcatatttgtttagtaggtattgatttttaaattaaaaactgttaccattattatatactctttcagcaaacaaaacgcacggaaaggagatgccaaaattgaagatttcaacaaaggtggaattcggaatcatcgctgttattgacattgcgtcacactcactaaacggcaatgcggtaacaactcccgaaattgccaaacggcaaaatatatctaaaaagtatcttgaacagattctctcatcactcagctcggcaggacttgtgcgaggtcagaagggttcaaacggcggttatgttattgcaaaaggccttaaagagattacattcaaggatatcataaacgcacttgacgcaaatgttctgagcaatgtttattttaacactcggggcgatgatgatgttatgataagacttatcgacaacagtctttggtcgaagatgtcgtcatatcttcaggaatatgccgaaagcattacacttgcacagctttgcgatgagtatatcaaaaacaatgaaattaaacacaacattccgatgtactacatctgatagattaaaaacaaaaagccaccgatttttatgtcggtggcttttcttgtttttatcggattttatttaaagctttcaataacctgacaggttttttcaatgtcatcttccgtgtgtgcaaatgaaacaaacatcgcctcaaactgtgacggtgcggcatagattccgttttcaagcagatgattgtaatactcggcatatctctttgtgtcggctgtggttgccgtgtcatagtcaacaacctttttgtcggtaaaaaacgccgtcataatcgaacccacacggttcacattaagtcctgcgttcttcattgcattttcaatctttgcagacttgcgttcaagctcgggatatatcgaatctttatttttttcaagaattttaagcgttgcaatgcctgcacttaccgctaccggatttcccgaaagtgtgcctgcctgataaacagaaccgagaggagcaacacactccataatctcttttcgacctccgtaaactgcaagcggcattccgccgccgacaatttttccgagggttgtaaggtcgggttttactccgtaaagcttttgagcaccgccgagtgaaagtctgaagcctgtgattacttcatcaaaaataagaagtgaaccgtgcttttcagtgatttcacgcaagaattttaaaaatccttttttgggcggaacaacacccatatttgcggcacaaggctcaacgattacacaggcaatttcatcaccgcagttatcaaaaagctgttgtacggattcttcatcgttatactttgcaagcagagttgtgtctgtgtagcccttcggcacacctgcgctgttcggaatggaatttgtcagaagtcccgaaccgccctttacaagcaagccgtcggaatggccgtggtaacagccctcgaattttacgattttatccctttttgtaaagcctcttgcggcacggattgcactcataaccgcctctgtgcctgaatttacaagtcggagcatttcaattgacggcatatttttgcggataagctcggcaagttcaatttctccgctgtggcacgcaccgaatgtaagtccgttctgacaggcagaagtcacggccttgataacatcgggctgtttgtgaccgaggatattcggtccccatgagcagatatagtcaatgaactcgtttccgtcaacatcataaatttttgaaccctctgcacggtcgataaaaagcggagttcttccgaccgaacggcacgcacggacaggactgttcacaccgccgggcataaagtcaagcgcctgtgcgtatagcttttcgctttgagttgtattcataaaagcacttccctatttgtaaaattcgtcaatccattttgcaacatcaagtgcgtggtatgtgattatgatatccgcacccgctcttttaattgcaatcatattttcgcacacaattttcttttcgtcaatccagcctttttcggcagccgccttgaccattgcatattcaccgcttacattataggcaacaagcggaaggtcaaagcgttcgcttgcggcttttacaatatcgagatatgcaagtgcaggcttgaccataaccatatccgcaccctcgtcaatatcatctgcaatttcacgcagagcctctttgccgtttgcgtaatccatctgataactttttctgtcgccaaattcgggggcagattctgcggcgtcacggaacggtgaatagtagcctgaggcaaattttgcactgtatgacataatcggagtgttgataagtccgttttcgtcaagtgcgtttctgattgcagacactctgccgtccatcatatccgaaggagcgatgatatccgcacctgcttttgcaaggctgacagccattttagagaggagcggaagtgtttcgtcattgagaatttcgtgaccgcaaacaacaccgcaatgaccgtgactagtgtattcacaaagacagacatcggcaataataaggagtgacggataatttttctttatgtatctgattgcgttctgagttacaccgttatcgtcataggctgatgtcgcaagctcgtctttatgctttggaattccgaaaataagaagtcctgcaataccgctgttttcaatttctttaaggatctcgtctgctctgttaagcgaatattggtagacattcggcattgaatcaacaggctttttaatattttcaccctctgcaatgaaaatcgggtaaatcaaatcgcccttgtcaattcttgtttcacgaacaaggctgcgaatctgctcgcctgctcttaatcttctgaatcttctcatatatttatccttctttcaaagttacttccttgattatagttttcaaaattccgtctgtgtccttcgtttttgcaatcttgaacgaatttacgccgtgactttcaagtgcctcggcggtaatttcacctatgcagacaacggaagttctgtcggaaataattgctccgccgtcaaaaaatgtgttcacacccgacgcactcgcaaaagtaataaaatcggtatcaacaacggaattatcctgttttttctcaagctgaatgtcataggttttgacatcgtcaaaatcaatgttgttatcagccaaaatccgagtgagttcgggcgaaccgttttcggcacgcagaatcaatactttttcgccgcttttcacagtttttgcaagcaaaattccaagttcacgggttgtgtagacattcggaatacagtcggcaaaaattccgtacttttcaagtacagccgctgttcccgaaccgatcaccgcaaacttgacatttgcaaaactgcggatatcctttttcagcttacgcagtcggctcataaaaatttctgcaccgttcatacttgtaagcaccacataatcgtagccgtcaatgccgtttattgcattgtcaaaagcttcgttgtcatgatattcaatcacctttaaaaggtcgtgccttttgacctccgcacccgaaagcgtgagcattttgccgagcttgtcggagagttttctcgtacctgtaacggtaaccgaaacatttttcaaaggtcttgtaattgtgggggcaaagtcaaattttgcggtttcgccaaccactataacagcaggcggtacaacctctgcggatttaacattttcgcagattgtcgagagagttcccctcacggtctgattttttgcacaagcgccgtttgacacaactgcaatgggagtatcctccgatttaccgttctgaataagattttccacaatatcggggaggtttctcaatcccataagaaagacaagcgttccgtcggtttcgacacatttctttatattttcgggcagggtgtcctgtgccgtatgtcccgtgattatatgaacacttcggctcagatttctgtgtgtaacagggattcccgcaagttcgggaacggcaatcgaggaagaaattccgggtacaatatcaaacggaatatcggcacttttgagggtttcaatctcctctccgcctctgccgaacacgaacggatcgccgcctttaagacggacaaccgttttgccctctctcgccttttcaacaaggatttcgttaatattttcctgcttttcgctgtgtctgcccgaacgctttccaacgcagattttttcagccgtttcgggtgcaaaaccaagcaatgacacatctataaggctgtcgtaaacaagcacatcgcagtgtctgatatactccgcaccacgcattgttatcagatcaaaatcgccgcatcccgcaccgacaatatacactcttccgttactcaatttcgctcaccagcctttttgcaagtttgattctgtttgaaatttcatctgttccgctgactgtttttttacagtcggcagacagagaaagcgttatcctgtcgttttcaacctttgaaattgcaccgacaggagttgaacaatcggcatttaggctgtgcaaaacctgtctttcggtttcaaacgaaagcattgtatttttgtcgctgatttcagcgagcattttggaaaccacgctgttttttctgctttcaattgcaactattccctgacacggtgcaggaagaaattcatcggtatcaaacggagttaccgtgtaatcctcaccgttgcaaaggtcaagtctttcaagtcctgcctttgcaagcacaagggcatcgtactcaccgttcaacagctttttaagtcgggtgtcaacattgccccttatatccttgaattttgcattaggatagattttctccgcaaaaagctttcgccttaaactgcctgttccgatgacaaaaccgtccttaatttcaaaatcattgcgtgtaacaaacacatcgccatagctgccccttggcaacacagcggaaatttcaagtccgtctgcaatttttgtcggcaaatcctttgcgctgtgaacggcaacatctgtttctccgctcaaaagcgacatttcaagttccttgatgaacacaccttttccgcccaaagctgcaagcggtttgtcaagggttttgtcgcctgttgtcgagatgtaaaccgtttcaattttaacattcggaaaacggtttttcagcgtttttattaacatttcggtttgtgcaagggcaagcctgctttttcgtgttccgatttttatcgtcattgttcgtattcctcaatcaaattttcaacagttttttcatcgggttcaagtcccgaaaggcaaagcgaaagaagctgttcaaaaatcttccttctgtcatcttccttttcaactctctccttaattatcgggcgatatttccacaaaacctcggttgtgttttcgttcatactttcaaggattcccacaaaaagctctttaagatattttgcgtaaatcggacttttgcccgatgttgtaattcccgccgttatgccgtttttgcttgcaattgcagaaaaaataaatccgcatttttccttatcgtcaactgtgttgacaagaatatttttctcattgcaaagctgaaaaattctgccgttgagcgtttcatcatcggttgcgctgacaacgcaaaacgcaccgtcaaggtcgctgtcacaaaatctgcggtcaatgattttcacattcaaagccttgatttcatcgcaaattttcggagcaacaacggttatgtcgggcgaaaacggcgtcagcttttcaatctttctgagtgcaaccgtaccgccgccgactacgagtatttttttgttttcaatgtcaatataaaacgggaaatatgccattagttattctctccgcactttctgtagatttcaagaattcttgcaaattcttctgccgaaacatcggatttcagcttataaatgaatttttccgaaaaatctgacggcattgcgttttttacggactgcatacacggcaaaaattcgtgaaaggcaaggtcttttttgagaacttcaatttcctcaaaaattatttcttttgcactttcaacactgtcgagtttgagagcattgttctcgtttgcaagctgttttatgcagtcaatgttaatgagccttacaccgcttattttggggatattttcgtcaatgtcgggcggtacggcaaggtcaataaacagccttgatttttcggtttttatattgttttttaaatcataatatgtaaccgtgtaatgcggtccgcttgtggcactgattacgcagtctgcaaagtcaaacgctttgtatctttcgtcataatcaatcacattcgtacccgtattttcaaaaacagtttctgctttgtgctttcgtgaagtcacggtaacgcttatacctttgtgcgacaaaagatttttcacaacggttgagccgaccttgcctgttgcaccgattacaaggacattcagctcaccgtctttgaattttgccgcctcgtttgacgcaagagttgcaactgaaaccgatgtttttgaaatggcggtttcggtcttgattttttttgcacaggaaacagccgcctgaacgcacatattaagctcatatgcaaccgtgccgttgtcctttgcaaaggcgtaggctcgctttagctgaccgagtatttcatcttcaccgataaccattgattcaattccgcctgccaccctgaaaagatggagcaaagccctgtcaccgtagaaaagacagatgtacttttttagttcgtcaaaatcaattcccgaaaaatccgaaagaacggtttcaaccgttttcacagatgattcgtcaccgcaaaaataaacctcggttctgttgcaggtgcagagaatcaaacactcgctgatattttcagaataataaagttcgtcaagaaatgtctttttttgcttatcgggaaaggcaagcttctttctcacaaccacatttgaagttttgtgacttacgctcaggcagtacataaaaatttcgctccgttacaaataaaatccgacagtaaaatacacttttaaagttattttattactgccgacagctattgtcaattaaagttagtcagttattttaccactaaacctatctgtttggtatgttttaattatactacattcaccattccatgtcaataaatttcgggttttgcttgacaaaaacagtgattacaatataaactatacaaagatacctcccgtcagcaaacagcgggagttttattccgatgtaaatacttattgtaccgataggaatactaaatgatttgaatatgtattaaggagcgtttttatgcttaatcagttttcaagaacacagcttttgattggcaaagaagctatggacaggctttcaaaaacaagagttgcaatttttggaatcggcggtgtaggcggatacacggcggaggctcttgcaaggagcggagtcggcgagcttgaccttattgacgatgacaaggtgtgccttacaaacatcaatcgccagatttttgcaacaagaaaaacagtaggcaaatacaaggttgatgttgcagaggaaaggctcaaggacatcaatcccgacataatcatcaacaaacaccggaccttttacactcccgaaacctcggaaaaattcgacttttcaaaatacgactatgtagttgacgcaattgacacggtaacaggcaaaattgagcttgttatgcaagccgacaaagccaagacgcctatcatctgttcaatgggagcaggcaacaagcttgatcctacagcgtttgaggttgccgacatttacaaaacctcggtctgtcctcttgcaagggttatgagacacgaactcaaaaagagaggtatcaaaaagctgaaggttgtttattcaaaagaaaagcctatcacacccgttgacgatatggcaatcagctgtaaaacaaattgcatatgccctcccgggactgaaataaaatgcacccaacgcagacaggttccaggcagtaccgcatttgttccgtcggttgcaggtcttatcatagccggcgaagttatcaaggatttgattaagtaaactaatatagttgtcttttcattttaatttgctattgttaaaaattgcaatttatagtataattatcctaataactatttagaggttgcaaaatgaacagatatataattattgcaggagttaacggaacaggaaaatcaagtttgcgtggtgttcttgaagggcaggaagttttgcttggtcatataattgatgctgatgctattgcaaaaatgaacaattacgataacataaaggcgggtaaaaaagcagttgaagaaataaaatactgccttgataacaatatttctttcacacaggaaaccactctttcaggacacagaaccgagaaaacaattcagcaggcacgaaaacagggctactatgttattatgtactatgtaggtcttaactcaaaagaagaaagtcttgcaagaattgaaaacagggtacggaagggcggtcatgatattccgaaaaatgatgtgtgcagaagatttgataaccgcttcgattctttaaaaagaattgttccgctgtgtgatgaagtaattttttatgataatgaaaacggatttattaaagttgccgaaataagaaacaacaaattcaattattcaaacggttacagacctaaatggattacagaatttgaaaataaactgaaattaggctaaggaaatgcaaagcaccgagagaaattaccctcggtgctttgcttgtttttataggattttttacagttgatatcgtgattaaacagattagatgataaccgattcttcctgaagtgatttgttacggagaatctgaacctcatcgcctttggtaatgaaaagccgataaagaaatacattgaccttttccccgacggtaatcggagtttcgtcaagtcctctgtacgcataaaccgtgcctccgtcacattttacggcaatttcgatattgtcgcctctgaatgaagtctttataacctcaccgacggatacagacgctttttgtgcagttgtttcgctgagctttgtcacctttacaaattcgggacggataactgcacggtcaacattatcgacaacatcaaaggtcttgaactttgtataatcgtcaagcgtagtagtctgaccgaaaaatgatgcggaaaatgcggtttggggatgctgataaatgtcaatcggcgagcctatctgctcaattctgcccttgtttgtaattatgatttcatcggcaacctcaatagcctcgctctgatcgtgggttacaaatatacttgtaacgccgagcctttcaatcatatccttaagccatgagcgaagctcctgcctaacctttgcgtcaattgcggcaaatggttcgtcaagcagaagaagattcgggtttggcgcaagcgctcttgcaaaggcaacacgctgtttttgaccgcccgaaagctggcttggataacgcttttcaagtccttcaagaccgataagctttacaagctcgtttactctttccttgataaatttcttgctctttttctgaattttcagcccgaaagcaatgttatcaaaaactgtcatatatctgaaaagagcgtagttttggaacacaaagcctatgcctcttttgcttgcgggaatatcgttgacaacctttccgtcaattacaatgtcaccgctgtcgggattttcaagtcctgcaatcatacgaagaattgttgttttgccgctgcccgaaggaccgagaagtccgataagcttgcccttttcaataccaaagtttacattgtcggatgccttgtagtcaccgaaagttttatttatatttttaagctcaacatacat

SEQ ID NO: 55 - DNA, 7433 bp, unidentified
  source 1..7433: mol_type = unassigned DNA
ctaaccattcacgtactccaatgcaaacctcgtccctttctccaaatcccggttcacgttctttcccaatatatctttcagatatttggggtgcaggccgaagcccggacggacggagcgaacgttccgctccgtaatcacttctccggccttcatatcctcggccacatagagagaacgtgatgcggaacggctacctctcattttctccgtcaattcgtaagtcgttttccccaaagataactcagccatgcgcacatcttttaccatttgggcaaaatctttctcttccatagaaaaagaacaatccggaccaccgatggaacgattcaaaataaagtgcttttctatcatactcgcaccttgagtaaccgccacaatgggagagacactccccagggtatggtcggaaagtccactttttacctggaaacgttctgccaaatcacgaatcatacaaagattggcttcctcaactggagccggataagaagaggtacacttaagaaccgtaatatcattatttcccattctgcggcaagcttcaacagccaattgaatatcttcttcggtggctatgcctgtagcaagtaccatcggcttatgcttcgaagccgcgtattctatcaatggaatatccgtaatttcgaaagaagctatcttataaacgggacagtccaaagcctcaagcatatcgacggctgtcttatcaaaaggagaagaaaaacagatcagtccttcttccttggccacatggaacaactcttcatgccactcccaaggagtataagcctgttcatacaaatcataaaaatattgcccgtcccatatagagccttcattaattataaaatcaggcttgtcacagcgaagcgtaatggtatcagcccgataggtctgcaacttgacggcatcggctccggcacgttttgcagccctgacggtttcaatggctgtttctttcttaccgttatggttggcagacatctcagccacaatcatacacttatctctcatgtctttactatttaatcgtccttagaatactttcaagctcttccatactatcagtctgaagtatgatataccctaaacggtctaaagagttttttatttttttttcagaataaggtcttatttcagaccgaaaaacagccgatgaccgggaagagcttagaaaatccacacaacgctgatagttgagcggattaaggaactgtaccgctgagcatttttcatgtttgcgaaggacatcaacgggcaaaccaagagaacagttcaccagatttctcagcatatctatcccggttgacaatggaaccaaatcagaggttatataatctcctccaagccggcaagcaatttctatgatataagcgcccgattcattcagctttatttctgtatgcgagggacaattattaagtccaatcaggcaaagtgcttttgatacggtctccgaaaccagctcccactcctgtttcgttatacgcgccggttcaatgtgcgtatcttcaacaaagaagccttctgcctcaccgatacaaagtttctccgtaatagtgacaacggtagttttattgttttgcgtatatgtttcaacactgaattcacggcctgttataaagccctcgacaatggcctttccggtacgggaataaccgagagcttcggaaaaagcaagtacaagttctttatgatttgtaaccttttttactccgcggcttgcagaggaatctaccggtttgacaatatatggataatcttgcaatgtgcccaagtccgtatctttatcacaaagcatgaaaaatggtacatcaatcccgttggccgcaaacatttccctctgcaagtatttgtttgtacagatttttgcgacctcagtggacatggacggaagccccagctgttccccgacataggaaaccacatttacaggcgcgtcacttgtagtaagtatgccgtcaacagagtgacgtttggcacattccaaaacaccttccttatccatcgtgctgacaagaaccggttccgaggcgtaccccattcccggagtattcgcatccatatctgcgactatggtatgcaatcccatatcgttcgcctttcggatgacaggaacctgcatttcacctgcgcccagtatcaataatcttttattcatataaccgaatttatcacatcacagatctttcttgcctgtgcttcactgaaccagaaatcattaaacaaattgacgatatgcttcacctccacttccgcaacaggagaagaaacacctttgaacatgtatgaaaccgaagggaaattagtcccggcaaacagaccggccttgaatattgcgtcaagaaccttctgccggttctcgatgacaatcatgaacctccagttctggaaatcatctcccatctgaatcgattcaggaagcagattcctgtatatcttgtttattttctctttttccgcaatcacttttgggagctttctttcaatgatgtcaaaatattcctcatcggtcatttgcaaatttgaggcgtccagccaaggatagtcagccggaagcatatatctgacattctccaggagacatttccttatatataccgaatgcttttgttcactaatgctatcatactaataatcaacaacttcgtaccccccctaaaacttgcatagccaccataggaaagttctatgaatttagcatatccggtactgtaaaggcagagatccacattttcaggcaaggaatctaccaattcgggaatgcacaaacaacaatcatcaatgatacaaagattttgatcgagacttttcactgctcggtaaaattctttgttgtcatactttttcccgtaggcatgcacaaatacaagaccggaatattttcccgcctctatagctgtcaaacatttctcggttgacatggcatggctttcatctatgtctataaattcaaaaccgacacctgctttcataaacgacaggggcactacaggacacacatttgccggcaataagaacggtttatcaaaatggttgccagacagataattatacaatatggccgaagctctttgtgaagttacttgcatatcaacagacttttaaacaaattgacaaaccgtttgggaatatccggagtgatggcatgtcttttacgaatggccatcttatccaaattctcagcaacaagagtaaaggcagcggcatcggtataatcacccaccccctgaatcagcccttcacgcaaaaacatataatagtcgtactcctgattatcaacataataccctcctataacaggagttccacaggccaatgcctcattcatcatcgtagaggcaggcaatatggcgacatctacagtactaaacaagtctgcaatggaaccggcagacaaattcttctgataggttactttggggtcatcaaccatattctcggctgcatacgaatcaccgacaattgccgttatcttcttcacattgtctttggctttaattgcatgaatggtctgatacgtcaaattcaagaaatcagaaccaccaaaagccaccaatacatataaacctcctgaataattgttccgtttattctgcagcgcaacattgaagaaaggcctcctcaacaatgaaaattgaagcccaaaggcaaattgagtatatggttcacacgaatagtcatcacgcgtgtaacccaatccctgattgactataagatcagccacatagtgcttgtcgtgcatatcatccacacacaccagacagcaacctttttgcttgatggcacgctggtaatcagtagtaaagaaatagttgtcaagtaccacaatttcgtcaccttgtaaaagggaaaggaactcatcataatgcgattcttcctgtaaggggatgaaaggacataccttctccatctcactcacctgataaggggtaggatggcaagtaaagaaggtacaatcaaaatcgtccttcagcatatcggccaaagccagagtacgaataaagtgaccgtagccgatggcagcacttgcatcggcacggagatagattttctgcattacatcatttatgaagcaactcatacttcatctctgccaatgcccagtcagtctgtgtatcaaggtcctgcacttcaagttcggaaagtaccaacccggctgtattctcaccccaaaaagtccggctctccacaaagggagcagtgcgagagaaatagaactgaccggcatcgtgataaatcggttctaaatcttgggaacgtgcatttttgtattcgggataaaccatactaatttttccatccacgatgtgaaggctgcgctgtataggataggaataagccacacaagtgaaaacggaatctatctccgaattcatttttccgtatgcttcccggagtctttcgggagtgacaaaaggagccgttgagtaaatgcaacaaaccgtttcaaactccctgccttgctctttatacttcctcagtacttcaagaattacatcatcagtaccggcatagtcatttgacatctcggcactccgcataaaaggaactttggcaccatacttacaagctattccggcaatctcctcatcatcggtagaaaccatcacctcctcaaaaagaccgctttgtaaagctgcctctatggaatatgtaatgataggtttacccataaagggcttgatattcttacgcggaatacgtttactgccgccacgtgcaggaatgattgctatatttttcatttcgctacaaattctataaccttttcaatcacatactcctgttcctcgtccgtcagcgtgggatacatcggaagactcagacaatgttcgtaatactcttctactataggtaaatcgcctttcctattgccccactgctgatagtaaggcatcagatgaagcggagcataatgaacctgcgcatagacattgttctcgtgcagataattataaaggcccaagcggtcagctacttgaatgatataaaggtgataagcatgatagacatcggcagcattgaacggagtcttgatgccatctattccggaaaacgcttcattatagcgtctcacgatttcatggcggcgttcaagacctgctttcgcacgctccagctgagaaatacccaaggcagcctgaaaatcagtcagacggtaattataccctaactcctgcatctcataataccagccaccatgatgctcgtgtaataaagcagggtctttcgtaatgccatgcgtacggtaaagacaaagcctgtcatagagctccttgctgttggtggtcaccatgcctccctcacccgtagcgatatgtttcacgggatggaaagagaatacggcacagtcggcaaaacgaccgttaccacaatgttgtttcttgcctttactgtccatgaaatagccgccgggagcatggcaggcatcctcgataatccacaaaccgtactcgtcggcaagctttctgaactcttccagatccaaaggatagcctgcaaaatcaactggaacaatacctttgtaagtaccgcggggagaagctttaagcatggcttcaagtttacggatatccatgaggtaagtatccttgtcaatatcacagaataccacctcgccgccacaatagcggatgcagttggcactggcagcaaaggtcatgggagtgacaatcaccttgtcacccggctttacattcagtgcggtagctgcaagatgaagccctgaagtggcattgttcaccgctacggcatattgtgcacctacatattcggcaaatttcgtttcaaattccctgattttgggaccttgtgtcaggtaatcgcttttcaaggtatcgatgactgcccggatatcctcatctgtgatatgctgacgaccgtatggaataggcttgcttatcatttcacctcgaaattagggtcaacgtatttctttatattctcgcgcatagtctctactgtctcccactccgtattgttgtcactgctgtagtggaaaccgtcgggaacgggtactgcattgtgatgtctgatgaactcttcgcgactgtgcttgaaagatacagaaggaagaatgacataatatctgcccaaatcgattgtatcaagagcatcggttacagtaatcatctcctcgtgcagcttctctcccggacggatgcccacttccacctgcggcagattgggtgcaatggcggtagccacgtcctggatatgataggaaggaatcttaggaataaagatttcaccacccaggtgatgtccgatggcatacatgaccaaagcgacaccggcttccagcgaaatgttgaaacgggtcatgcgcatatcggttatgggaagttccttcgccccgttgtcacgcttgttgataaagaaagggattacggaaccgcgggaacccatcacattgccataacggactacggagaacctgatgttcttggaaccgctgatattgttggcagcagtaaacagcttgtcggaagtgagcttggtggcgccataaagattgatgggggcacatgccttgtcggtagaaagggccaccacatgctgtacaccggtggcaagagcagcctttatcacattctgcgcaccgtgtacattggttttgatgcactcttcgggattgtattcagcggtatccacctgcttgatggcggctgcatggataatcacgtccactccttcgcaagcccgcgtcaggcgttcgaggtcacggacatcaccgataaagaaacgcagttgcggatacttatgaccgggatatttctgtttcagctcaaattgcttcagctcatcgcgggagtaaataatgattttctttacttgcggataatcacggagaatggtttccacaaacttctttccgaaggaacccgttcctccggtaatcaatacggatttattgttaagcattataatgaaaagttttattcatcgatatattcccacggatagggattgtctgtcacattctgaaactcatcaaccgcttcctgctgttcgggagtaagtgataaggaatcccaagaggcgatgatggaacggccctcgtcggccaaagactcgtcgaacacttcaccgtagcaggcggtaagcagacggagcttcagtaaggaagcgggaagggcatcgagcacatcccaacaacagtccagcactttctggacatgccgctgcttttcgccatggtccacaaaagaggcgctgtaacccataagaagggcaagacagacatttgcctgctcttcgatggtagtgccttttacacccgaccggtacaaagccatggtaagacggtagacctcaccgttccgccgtgacaagtcatcgctatagacgggactgccgtccatacccaaatacatcagttcgtgcgcagcacgctgaagagtgattgcttcttcggaaagagacat

SEQ ID NO: 56 - DNA, 12722 bp, unidentified
  source 1..12722: mol_type = unassigned DNA
ttatttattattctgctgtctgcaccactggattgtctctacaatacccttttcaaatgtatattgtggttcaaagccagtatcagcctttaaatcttctatatctgcacacagatacataacctgattaggactataaggtatatccccgaatcctatttggatcgtactatctatgctttctcccattatattaatatattccttaagcggtcttgcctgaccacttcctatacaatatatttttccatctatgcccttctcaccaagcagtctcatagccagtgctgcatcttttgaatacagaaaatcccacatctgctcacccttcgtacatgaaggaacttctcctttaagaagtctgtctatcgtactcattaccattgttttttcgccatcatatggtccatatatactgagtattctcgtccagatatgcttaattcctttctgctggcacattatacgtgtcatctgacctgcgcataatttagctattccatatccattttctggaaatgttggggtacttccattaagttttccctcaaatcttccatattctgcctgtgagcctgctcctacgaatgttttacatcctaactttgaggcagcttctacagcatcaagtgcatatttaacattaaggttctgtcctttcatgttgttacggctgtctccgaatgttccatcccatccaaaatgataaaatacatctgctccatccggtattaattctggcaatttatcaagcttagaaagatcacacttaacacattttactaaagaactttcttttattctgtcagctcttttagaaccaggtcttacaacagcaacaacttcaataccattagcttcaagttcattaatcaaagcaatacctatagaacctgttggtcctgttattacagctcttttcatataaattgtacccatacctttcaaatatatcttattttactactttttaccaaaagcccatattttatttaagaaaaagttaattgggatgttgattataagattaataattggtgctatcattttgcttacatgtagtactgaaacccatataactgataaaacattatttaatattaatcctgtaaatccatatgatacatatgttttaaataatgctgcccatatatttctatgttcaccttcttctttcttaaacacaaacttattattccaataaaatgaccagagaacactaagcacccatgaaactacattagctataatatagtcaaatgtcactccacttttagaaacaagaacaagcgttacaacataaagtaaatatgatattacagtattagatacacctactaatccaaactgtagaaattctttaaatgtctgtctggttttatctgttaaatcctttctaataatcttaaaaagcaattcaacaaaaaacatgtatattttttctataaatccgtatatcatttttcccatatcaatatatacccttacatcattataatccagacattaaatataatgtctggattataatattatttatttttaatatatatcagactactgattaactgcttcctttatagtcttagccatataatctatcatctcatctgtcattcctggatatactcctacccagaatgtatctctcatgattctgtctgtattatcaagatttccaactactctgtagccttcctttgttgctctcatctcatcaaagcatggatgctttataagatttcctgcaaaaaggtttcttgtctgtactccgtggttttcgatatactctacaactgcctttctgtctatgccttcctttactgtgataaggaaaccaaaccagcttggtcttgagttatcacatggtactggaagtattaccttatcttcgatatcagcaagcgctgctcttaatctgtcaaagttatgtcttcttctttcaacgaatgaagggaacttctcaagctgtgcacagcctactgctgtctgcatatctgttgccttaaggttatatccaaagtgtgaatatacatacttatggtcatatcctaatggaagttctccatactgcttatcgaatctgtgtccgcagaggttatcctttcctgatgggcatacgcagtcacgtccccagtctctgaatgagcggatacacttgttaaggagtgcattgtttgtgtatacagcaccaccttcacccattgtcatatgatgtggtggatagaagctgcttgttccgatatcaccgattgtacctgtgaacttttcttcaccattgattgtatacttagaaccaagtgcatcacagttgtcctctactaaccagagattatgcttatcacagaattcctttactgctgataagtcaaaaggattaccaagtgtatgtgctatcatgactgcctttgtcttatctgagtaagcttcttcaagctttgttacatcgatgttatactgtggaatagtaacatctacgaatactggaacagcaccatactggatagctggtgttactgttgttgggaaaccggcagctactgttattatctcatcgcctctctttattcttctgtcaccaagaagtggtgatgtaagtgccataaatgcattgaggttggctgatgaacctgagtttactactgatacatactttacattaagatattcgccaagcttcttttcaaactcatctgtataacgtcctgatgtaagccagaactcaagtgctgagtctacaagattcatcatttccttgctgtcatatacgcggcttgcataaggaattctgtccccttccttatactttttctggttatgatacttcttgcagtattcatcaacaattccaagaatttcttctcttgcttctaattcgttcttgttttcaaacatacttttctccattctatatttgttatattccaaaatttttatatttccgcatttttatttctaagataatatattgatgtcggggtcgaaagaaagctaataatatatctttttagcttaatcattaaagaattcatcaatttccttatcaagacatgcaacaacgtctccgccagatgcatatacttttgaccattctactgacttttctatagccatatcaaaattccatcttggcttccagccaaatgtcgtctttaacttagaacaatcaagctttaagaaattagcctcgtgtggacctccatcatacttgtttatccacttaagtccttctccccacttgttacagaatgtatcaacaagtgttcctgttgttatacagtcactctcatccggacctacgttataaaagcctgcatacttcttatcttcgtactgcttcatggctatcataagataagctgcaagtggttctaagacatgctggtatggtcttgttgaatgtggattacggacaactatatcctctttctttacagcagcccttacacagtccggaacgattctgtcgttggcaaaatcaccaccacctataacattgccagctcttgctgttgatactgcaacatccatatcattaaaaaatgaattgatatagctgtgtgttacaagctctgaacatgacttgctgttagaatatgggtcatatccgtccagaggctcattttccctgtagccccaagcccattcgttattgtggtataccttatctgttgtcacgttaaggaatgactttacacatgagttaagccttacacattcacatatattcactgtacccatgacattagtctcatatgtgtatactgggtctttataagaatctcttactattggctgtgctgccaggtgaagcactatttctggctgtgtttcttcaaacacattttttaaatgttcaagatctcttatgtctcctattactgagtttatgttgttctctacatctgccatagagaaaagattaggtgttgtaggtggtacaagtgaatatcctgttacctgggcacctgcctttacaagtatcctgcagagccatgaacccttaaaacctgtatgtcctgttacaaggactttctttcctttataaaagcttaaatccatctttgtatataacctttctgcttatcaactatcttaaaacatataaatattcatcttatataattctatataatctgccacctgtgaatttaccacttcttccaaggagctgttcctgtggcaagatacttctcaagcatatccatctctcttttgttatccatgcactgccagaagcccttatgcatgtatgacataagctgtccttcttttgcaagcttttcaagtggttccttctcaaagactgtatcatcaccttcaatatagtcaaatatttcaggatttaacaccatatatccggcattgattggagctccatccatgtggctcttctctctgaatgacttaactgcattgtcaccaccgatatcaagcacgcccttctgctgctctaacataactgctgtaagtgtagcaatcttgccatggttcttatggaaatctacaagctttgatatatcaacatcacatactccatctccataagtcataaggaatggttcatcgcctacatacttctggattctcttgattcttccacctgtcatagtgttaagtcctgtatcaactacagtaaccttccatggctcacagtgctgctcatgaataatcatatcgttagttcccttagtgaaatcaaatgtgatatcactgttatgaaggaaataatctgcaaaccattcttttattacatactgcttgtaacctgcacatatgataaattcatcaaaaccatagtatgcatactccttcataatatgccataaaataggctttccacctatctcaatcattggctttggcttaaactggctttcctcacttattcttgttccgaagccaccggctaaaagtactactttcattcttctcctccagtctattcatatatttaatatctctttggcactttattaatcaacacttctccaatattcaagtgtttctttaagagtctgttttaatgaaatgaccggctgccagccaacttctttcctaatcttatctatatcaggctctataatcggaacatcaacaggacgaagctttttttcatcaattttaacttcaatatctctgtctgacattgctataatctcgtcaagtatctgtctgatttcaatggcatgtcctgttccaacattgtatgtttctccgcgtctgccatttttaacaagaagtgcataagcctttacaacatcccttacatctgtgaaatcacgttttgcacttaaatttccaacatatattactggttcctgttttcctttttctatatctgcaacctgcttacagaaatcagcaaccacaaacataggtgtctggtttggtccaatatgattaaatgcccttaccatcataacatcaagtccatatgcatctgaatatatctttcctaacatattctgacatgactttgttgctgcatatatatttccaggtcttaacacattatcttctatgataggacattcatctttctttatatgtccatattcctcacctgaacctataagaagcactcttggctttttatcagcatcctttaccgcttctaataaattcacacaaccctttatgtttacatctactgtcagtgtaggattcttccatgaataagcaaccgaagactgggctgcaagatggaataaataatctggtttttcctcactaagaagctctgatatctgattcttatccagaatatccagattccttacaactgctgaatctattgtaagagtttctttctccgtcttggtaactgtcacatcatatccaagatctttagttaagtgtcttacgagatatggtccgacaaatccacccccgccaactactaatgccttcattaactacctctcttctgctacattaaatattgtcaggacagattaatcattctctgccctgactataaacatcattatatttattaattattagcagcttctttcttaacaagttcaagatcattcttaaccattctttcaactaattcctggaatgatatttctctcttccatccaagctttgactctgccttagctggattaccaataagaagttcaacttctgctggtctgaagaaatctggattaaccttaagtacaaccttgcctgttgccttatcctttgctatttcatcaacaccttcaccctcaaactcaacttcgattcctgctgctgcaaatgctgtcttagcgaattctcttactgttcttgtctcattagtagcaattacataatcatctggctcatcctgctgtaaaagtaaccacatagccctaacataatcctttgagtgaccccagtctctctttgcatcaagattaccaagttctacacaatcctgaagtcctaacttaatatgtgctacagcattagtaatctttcttgtaacgaactcttttcctcttctttctgattcatggttgaaaaggattcctgaacaagcatacatattgtagctttctctatagttctttgttatccaatgtccgtaaagcttagcaactccgtatgggcttcttggatagaaaggtgtatcctctgtctgaggtatagcctgcaccttaccgaacatctctgatgttgatgcctggtagaatctgcactctggctttacgattcttatagcttcaagcatgttagtaacaccaatagcatcaatatcagctgttgtacatggtgtatcccatgatgttgcaacaaatgattgtgctgcaagattatatacttcatctgcctgtgatatcttcattgctgatataagtgatactatatcctgcatatctgcgtagataaagtgaatcttatccttgatatgatctacgtttccgtaatccacaacactctttcttctcataagaccatatacattatagcccttttcaagaagaagctctgctaaatatgaaccatcctgtcctgttatacctgtaattaatgcgtttttcataattaatctccatttctataaataaaaatatacgctttaaactcgcacaaaacaccttaccacaaaatcatattacctgtgtctggcatattgcaagtattttcacgaaagctaaattaacttttatagtttccacacttaaatcattatatatttaccaaattataaatactgattctttccctcttctctaagcttagcaagtactttctttatctcacctgcgttctccttagtagaaatgagtgtagcatccttagtatcaacaactatcatgtctcttaatcctacagttgcgataagcttgtctgcaccttcaataacacagttctgtgtattaactgtaacaacattgccattcacaacattaccttctgaatcattttctttgattcttcctactgcaagccatgagccaacatcatcccagccaaaattaccagcaagcgtgtatatatcagaagccttctccatgataccatagtcaactgactgtgattcaagattagggaattccttttcaagagtattctgataatctgctgtaccaactgattctttgatctttaataatccttcatatgttgaagtcatatacttcttaaagcatgaaagtatagtcgataccttccatacaaacatacctgagttccaaagataagaaccatctgcaagatatgccttagctgtatcaagatctggcttttctacgaacttctctactgaaaagctctcaccctctttattatccttgttatactttatataaccataacctgtttccgggtaattaggtgtaataccaacagttacaaggttctcacccttctctgctatatcacatgcattaacaaatgtatccttaaatatatcattgtgctttataagatggtctgatggaagaactatcataaccgcatcatcatacttgcttgccacatgaactgcaccaagtcctatacatggagctgtatttcttccaataggctcacataaaatattctcctcaggaagacctggaagctgctgctttacaagttccttataattagcattcgttgcaatatatacgtccttaatatcaactaatggactgattctctcaaccgtaagctgaatcattgtctttccatcatctgttaatgataaaaactgcttaggaaggttaactctgcttcttggccagaatctttccccttttccacctgccattattaacgctgttttcttcatgatatacctcatttcttatataaataaatatattaattgccatttctgcgcaccttttgtgcatatcgagtttgtatcaaatatatgtagacttcacacatatacgctggaaaattatatctcatactgctcattttgtcaattaaaccggctcaaacggtattataaacaacacaaaattataaaagctgtaattcattttacacataaactacagcttttatcattaacaaatattttttaattattcaaaagataatcagagtatatttctgccattttgcgccaattaattaaagcttctcctatattggcaccacacagctcgcgataaattgcccatacaaaccaataatatgctattattgcaacataggccatgtaatgaaatcttgttttctcactatattcttcctgaagatactcttttataaattcttctgccttatcaaaatcatacattgcatctacaatataataacctacatcaattccaggatctgaatatccaccatactcccagtcaataagtataacacttccatctggttttatcatccaattaggtttatatgtatcaccatgacaaaagcatttatctactccatcgccaagtgtcatattataaagcttttctatctttaattttaactgttcatattctttaaagcaatcggaatcttttttcttaatcaaagcttccatctcaagagcatcttcccatggtttcataccataatcaactttaatatctgccttatgcaattttcttagcactgaaagtatctttttagaatcttcaaaagaattatagtctggttcacggaattctggtataaatacagaaattttccatccttcattcacatctgcatatatatatgttggatcaattcctatttttttagctaaaataagtgattttttttcattttttctattaattatactttctgttccatcacctggatgcctgtatatataatccactccatcaatcttgaatatgaaagatatattagtcataccttcacttacatttctaaagtcaactatatcttcttcatcgcatctgaatacaagcttaatatttcttattatttcactatgtgtataacctaaatattgcgaatcaaactttcttaactcttcaaaataatcaaattcaaatatatttccttttttatactctctcacatacattgatggtaaatcagaaagcttatcttttaaaaggatttcccaataagaattattatattttccatcatctctgatatcttccattacattaataaatgaatcagaaaactcttttttccaaaatgaatgtcccataagaatataaccattatctattggtttattatccatgcagactattttaccatctgagtcgacatcagcatatatctcttcagtaataagatttccacgataacctgagtaatatgtaatatactcatattgattaaatggattctctatatagtaactgtcacttacacatatgtatgtattctttaattcttcttttgcaagatacaggctttctatattattcttaatattaaatgaatcattaataataagtttaacgccatacttatcctcgagatagaaaaacatttccttcttatatccaagaactatcgtaatattcttaattcctgcattttgaagttgttctatctgtctttcaataagcttttctccccttacttcaaacaaacctttcggctgttccagtgataaaggaataaatcttgttgatgaacccgctgcaagaataactgcattattaaccttatatggctctaaagctttaatacctaattcagtaagacatccactctctttatcaatatatcctgcatgaactaatctgttatatgctctggtatcagataaggctctgacacaatctaatgcatacgaacaatccgcacggcctatacttccgttatataaactgttcaatatataaaattcattttttttcacagtgaatacctccaatgtaattcaacttttattcctgtcccggataatctttatatgaagaatccagctgcacaagttcatagaaattatctatttccattatatctgacttctcacatggtcttacttcaacattatatctttctttgcgtaataccaatggtataaattcccagaaataatccttaccatcttgttcctcttcatacacctgtttaaaatcatttcgtaattttttactatcatctttattccaatatgatataccataataattaaaacaaaacgtattaccttttttgtaatcagttatataaccgttatcaagtttataactccaatcatctgtttctattgagaatgatccaagaatgttactgctatactgatacttactaattatatccggattagatatatataagtctgcctcacataaataacattcatcaatattctcaagagcagccatagctgatgatatattgtttgttttatcatacacatcattatcaacaaacttaataaaaggatatttatcagtaatttcatcaaatttttctttcttgtatcctcttaccagagttatatcttttattccgactgatactaatgcatctaaaagtgtatctattattctcacgccattgactttaaccattggttttggcctgtccagtgttaccggaaccattcttgaaccaaaaccagcagccattataaccgccctttttactctatatggctcaagcatatcaagacctttagctgtaatttctaacaggttttcatctcttaatattgcacctatattggtcaactcatcaagtgccttactaacctcagtacctgatatttttaatttatctgaaagtgttctgattgcataaacattctttccatttttttcaagaaatgcaagaacttcaaactgataacgattcataataatcctcatttctgtacacactattttacatataacttatttaactatcataggtatgatatatatgcccaatgctatacatgtaactataattgtacatactttccaaatattgtattgtttatccatcttcttttttgtttcttcatctggttcttcaataataccgatttcttcttcaatagatggcatcttaaattcttttttatgtgaatataaataatagaatattatacatgcaaccgttattattccagatgtaagaagtgccattttgtctgcgaatataagcataaaaacatataaaactatagtaacgacacatccaacaaccccaagtggtgccttatatggtcttttcatatcaggatattttttcttaagacctatatatgataagcatccaatcatataacatatagccagtgaaataagcgaaacagaggctatatagtcaatagatcctgtagcaattaatatgaaattaattactccaactgcaattactgctatataaggtgtcttatactttggatgaatcttacccaggaatttaggcaatgctccatcctcggccatagtatatatatatctcgctggtgcagcaattcctggattaattgtagataaatcaccaccgaatgctattcctatacaaagcaaaattatagggaaacctattaatcctactgcctttaacccttccgcatatggtgcattagccactgcaagcacaccgtaaaactcttttggtacaagaccaactaaaaaccactggaataatgcattaagtgcaaataccataaatacagaaattttcaatgctcttggtaatgtatactgtggatatttagtctctgcacccattgaaacacatgtttcaaaaccagtataacaccaccatacaagaccaaatatatacatcatttcattaaaaggtggtaatgaattcatagcaattccaccaaaatattcgagatgtaccttaggaatcatatataaaaaccaacacactgaacatccccagaagaaaaacataaatgctgtctgtgcttttccagactgctcaatccccctgaaattcaatacaagaaatactgcaacaagaataatggcaataattcttgaatccaaccatactatatcaactccaagctgatcaagtaatattttaaaataattagcaaatgctaaggtttcaccagctcctatagcaactaccgatactatataatgccatccagcaagattagcccatattctgtttaatcctcttttagcataattataagttcctcccgcacatggaagcgctgctgacatttcaccatagataagacatggccatattgatattaatagtgctataaatgtaaatgctataatccatgagcctacacttcctatctgtgctgaaccacacgtaaataatccaactccaactaccgttcctatagtcatactaattgcttcttttaacccaagagccctgaccaatttgttatctcccat

SEQ ID NO: 57 - DNA, 19087 bp, unidentified
  source 1..19087: mol_type = unassigned DNA
atgaaaaaaggaaataaatacggaacgcatagagtaatttcaccgaaaggagtattaccacaaccggctgacaaactggataacaatatggacgaaatctatgataacgagattttgatcgatgtgcaaactctgaatatcgattcggctagttttactcagattgaagaacaagccggaggggataaagctaaaattgccgagatcatgctgggaattgtagagaaacaaggaaaacaccgtaatccggtgaccggttccggtggtatgttactgggaacggtggaaaaaatcggagatgctttagttggaaagaccgatctgaaagtgggagataaaatcgcaactttggtgtctttgtcgctgactccgcttcgtatcgataaaattaaagaaatccgggcagatgtcgaccaggtggatatcgatggtaaagctattttgtttgaaagcggtatttatgcgaagattccggcagatctgccggaaaagttggctttgtcggctctcgatgtagccggtgctccggctcagactgctaaattggtgaaaccgggagatacggtattgattatcggtgccggtggtaaatcgggtatgttgtgttgctatgaagcaaagaaacgtgctggtgttaccggtaaagtaatcggtttgtgccatagccagagaagtaccgaacggcttcagaaattaggcttctgtgattatgtattctcggccgatgcaactcagccggttccggttatggagaaaattgccgaactgacgaatggtgaaatgtgtgatattacgatcaataatgtgaatattacggatactgagatgaccagcatcttgtgtactaaaaatgacggattggtctatttcttctctatggcgaccagttttacgaaggctgctttgggagcggaaggtgtcggcagcgatgtgactatgatcgttggaaatgggtataccaaaggacatgctgagattacactgcaggaacttcgtgaaagcgaggcattacggaagatatttacagagttgtatgcctgaatggtcgggattttataatcccgacgaattaaaaatatgtttttatggctagcagaagaaaagagtttttccctgaagtgaccgatgaacaatggaacgattggcattggcaggtgaagaacaggattgaaactttggatcagctgaagaaatacatccggctgacaccagatgaggaagagggtatccgtgagtcgctgaagacattacggatggcgatcacaccttattatctgagtctgatcgatcccgataatccttattgtccgatccgtaaacaatcggtgccgaccattgaagaattacaccggtcaccggctgatctggaagatcccttgcatgaagacggtgattcacccgtaccgggactgacccaccgttatcctgaccgggtgttgttcctgatcaccgatatgtgttcgatgtattgccggcattgtacccggcgccgctttgccggacatcacgattgtgccactccattggaaagaatcgataaatgtatcgaatatatcgctaataccccccaggtgagagatgtcctcctatcgggaggggatgccttattggtcagtgacgaacgattggaatatatcatcaaacggctgcgtggaatccctcatgtcgagattatccgtatcgggtcgagaacaccggtggtgttaccccagcgcattacgccggaattggtaaatatgcttcggaaatatcatccgatttggctgaatactcatttcaaccatccgaacgaaattaccgaagagtcggcggctgcttgtgcccggctggccgatgcgggtatacctctgggaaatcagtctgtcctgctccgcgggatcaacgattgtacacatgtcatgaaaaaattggtgcacgagttggtcaagatccgggtacgtccctattacatctatatctgtgatctttctgtgggtatcggtcatttccgtacccctgtatcgaagggaatcgagattatcgagaacctgcggggacatacttccggttatgccgtgcctactttcgtcgtggatgctcccggtggaggcggaaaaattccggtgatgccgacctatctgatttctcagggccccaatcgggtggtgttgcgtaattttgaaggcgtagtgactacgtataccgaaccgacggattacagagacgaatgccactgtgaagagtgtgagaagcgccgtaaaacagaaggagtggctgagttgctgagcggagaacgcttgtctctcgaaccggcgaatctggatcgtaagacacgtaatctattggcgaaaggataaattatttgtgattttggatttaccgtttcattcgattgaaaggataaatccggaatcataaatgaaaatgctgaacagatgggttttgttgatgacatatccgattacaggagtctggcaattgtcggattggagaaaaatacagggaaaacagaatgcctgaattacatccttcgcaggataaaagattcggcagatcggttcgctctgacttcgatcggaattgacggagaaaaccgggatcaggtatgtcaaaccccgaaacccgagattatcgtgccggaaggaatgatattcgttacttcggagaaacattaccgggagaggaggttggtggctgaaatcatggaaatcgatgatcatcggactgctttgggacggttggttatcgccagggctaaaacttcgggaaaagtattgctttcagggcctgcggatactgccgggttgaaaagtctgatccggcatatgaaagatttcggggtacgaacgaccttggtcgacggggctttgtcccgtttaagcctggcgtctcccaccgttacggaggcgatggtcttagcgacgggggctgctgtttccgggaatattcgggaattggtgagacgtacccgttatgtttgtgatttgatcgatctggaagaggtggacgaagttttacaagagaggttggatgccattcaacaaggtgtatgggcggtcgggccggagggagaatgtatcgatctgaaattgccttctgtgtttatgctggagaaaagtggaaccgatctgctgcaatatgggcatcggatctttattgccggtgctgtgagtgataaagtatttcagtttttacgcgtacagaaacagaccgtagaattgatcgtccgtgattttacccgtgttttttccgcacctgagtctttttatgcctttttacgtaagggcggaagagtacaggtgcttcatcgtagccggcttttggccgttacgatcaatcctcagtctccgggaggattacttttggattcgttgcgtttgcagcaagcattggaagaaagcttgcaaattccggtgtatgatgtgaaaaaaatagaaaaagtcggtaaaaaccgttgaggatatgattttaagggaagcgataagacaagtcaggggattccgttatatgatcgaacaattggatatctgttcggctgtaggccggagggtattgtatgatctgccctggctcgattcgaaatctcggttggaggccgaatttgaacgtattcaaaagatcatggtactttttgaacaacctgaaaatgaatcccggctggaacgtttgactggtaagctgatgcaggtgagagatatccgggggacgatcgggcggatggcgatggagcaagtgttggatgatcttgaattgttcgaattgaaaacttttgctttgtgctcggaagaaatcaggggacttgtcgaagaatggcggattgttttactcccggaactggagccggttgtacgtttgttggatccggaagggaatcggattcctcatttttatatttatgatacttattcggctgagctggccaggctgagagctgaaataaaacaaaagagccttcaaggggcagaagaacgggaattagaagcgttgtatgtacaaagtgtggttttggaagacaaggtacgcgaagagttgtctgtgcagttgagaccttatcacgacgatttgaaacaggctttggaagcggtcggattgctggatgtcgtattggcaaaagccagacaagcaataagaggacaattgactttgccgcaaattccggaagagggggaaatggtgttcgaaggtcttttccatcctcagatccgggagattttagaacaggaaggaagagcgtttcaggctgtagatttgaaattggaaaagggaacgacggtgattaccggagccaatatggccggaaagacagtgttgttgaaaagtgtgcaattggcgcaatacctgatgcagttcggtttttatgtacctgcccggcgggcgggtatgccgctcgtggaacaagtcttgaccagtatcggggatgatcaggatgaattgaacggtctctcttcttatgcggctgagatgttgcgggtggatgaaatgatccggcaagtcaggcagcgaagtaaaattttggtgctgatagacgaattggcccggacgaccaatcccgtcgagggacgggcaattgtgaatggggtagtggattttttgactactcaccgggtgatggctatggttactacccattatagcggaataacggccgaatgccgtaaattgagagtgcggggatttgtagagaatcgggttgaagggaatatgaccctgaaaaatatcaatgagtttattgattattcactcgaagaagacagcggagaagaagttccccaggaggcgatgcgtattgcctggatgctggggatcgaccgtggagtgttggaacgggtggaaaattatttgcaggaagaaaatcctgattggaaaaagacagtacagtagaaagaaaatatatatgaaaagtaaattaggaatagattttgataaagtcggacatgcccgtgaaatggcccgtaagattgctgaccaggtgcaggattttgtggatggctatacgacagtggctgtcgaaaggacattgtgtcgtttgctgggtatcgacggagtggatgttcatgctgtccctctgccgaacattttggtagacgagctgaaagaaaagaacgtgttgggagaaggaattttattctttctgggtaatgtaatggtggaaaccggaatgactccacaggaaatagccgaacaagtggctgccgggaaagtagatgtcacccgggtaccggtatgtactcccggccagcgggaaaaagcgttgcaaccctatatcgaggccagtatccgtcggatttccgacaaccggaaacggcgtgagaattatatcgcaacgatcggagagggagcaaagccttatctttatgtcattgtcgctaccggtaatatttacgaagacgtggtacaggcacaggcggctgcccggcaaggggcggatgtcattgctgtgatccgtacaacggggcaaagtttgttggactatgtaccctatggggctacgacagaaggattcggcggaacttttgccacccaggaaaattttcggattatgcggaaagctttggatgaggtaggagaagaagtcggtcgttatattcggctgtgtaattattgttccggtttatgtatgccggagattgctgtgatgggagctttggaagggctggatgtgatgttgaacgatgcgttgtatgggattttattccgggatatcaatatgcagcggacgttggtcgaccagtttatgtcgcgggtgatcaacggctttgccggagtgattatcaacacaggcgaagataactacctgactactgccgacgctgtcgaagaagcacatactgttttggcttccgatctgatcaatgaacaattggctttattggccgggctgccggaagaacaaatgggcctgggacatgcttttgaaatggatcccatgctggaaaacggctttttgtacgaattggctcaggcccagatgacccgggaaatttttccgaaggctactttgaaatatatgcctccgacgaaatttatgaccggaaatattttccgcggacatattcaggatgctcttttcaatatgatcggaatctggacttcacaaggtattcaactgttgggaatgccgaccgaagccatacatactccatttatgtcggatcgttatctgtcgatcgagaatgcccgttatatttttaataatatgaaaaatatcggagatgaagtggtctttaaagaaaacgggattatacaaaacagggcgaaagaagtgttggataaagctaccgttctcttggaaaagattgaacgggaaggactttttacagccttggaaaaaggaatttttgccgatatcaagcgtcctaaaaacggaggaaaaggattggacggcgtttgtgccaagggaaagaactatagcaatccttttgtagagatcatgatgaacagataacaaaaatcgtaaatcaaataaagattatgagcggaggtttatattcaacagaagggagagatttcgatcaaaccctcgatctgaaaaagataaaaccctacggggatacgatgaacgacggaaagacacagctgagtttcactttacctgtacctgccggagatgaagcgatagaggctgctaaacagttgatgaaaaaaatgggatttgaaaatcctcaggtggtgtttcatcaggaactgacgaaaggatatactttttttaattgttatggaaattgtgtacacacggtagattatagcaatatctatgtgccgaaagtggaatcgaccaagtgggatatgggagagaccgatcagtttgtccgggaacatatcggtcggaaaattgtggtgatcggagctagtaccggaacagatgcccatacggtgggaatcgacgctattatgaatatgaaaggttttgccggacattatggtttggagcggtatgaaatgttcgaagccttgaatatgggtagccaggtgaccaacgaggaatttatcgctaaggctatcgagttgaaagctgatgctttattggtttcgcagaccgtgactcagaaagatattcatattaaaaatctgacggaactcgtggagatgttggaagccgaaggattacgggacaaagtgatcctggcttgtggtggtccccggatttcacacgagttggcgaaagaattggggtacgatgccggcttcgggatgaatacctatgccgacgatgtcgcctcgtttattgcgcaggaattggatcgaagaatgaatcattgaaaatatacaagctatggaaaaagaacaaatcagggaagtgattgccaggagagtggcaatggaactccacgatggagacgtggtgaatctgggtatcggtttgccgactttagtgccgaattatctgcctgaaggtgtcgaggtcatcttacaaacggagaatggattgatcggtatggggccgactcctgctccgggagaagaagatccggacttgatcaatgccggcggtggagcgataacggctctgcccggagcggccagcttcgatagtgctacttcgttcggtattatccggggcggacacgtagatgtcagtatcctgggggccttgcaagtagatgaaaaaggagatttagccaactggatgataccggggaaaaaaacaccgggaatgggaggagcgatggacctgctgatgggagccggtaaggtgatcctggccatggaacatacggcaaaaggaaatccgaaaatcctgaaaaaatgtactttacctttgacagccaaggggcaggtgaatatgatcgttacagaaatgggagttatggagatcacacccgggggaattgtactgaaagagatacatcctgagtttacggtagaacaggtgcaggcagctacagaagtaactctgatcgttgccccggatttaaaaaagatgtgctgaacgacgaaagcgtattgaaggaaatcacgatggaggatggatggtggatacctctagcccgaatcgtaaactataaattaaaaaaggtatggatttttcattatcaaaaaaagagatattgtttcagcagatgatcagagcatttgctgagaaagaagtaaaaccgctggcggcagaagtggacgaagaagagagattccctgtcgaaacggtagaaaaaatggcgaaactggggattatgggtatccctttcccggtggaatatggcggagccggtggtgataacgtattgtattctatggctgtagaggaattgtcccgggtatgtgcaacgaccggggttattgtttctgcccatacctctttgtgtgcttctccgatctatgaattcggaaatgaagaacaacggaaaaaatatttacccaaattatgttcgggagaatggatcggagcttttggtctgaccgaaccgaatgcaggtaccgatgcctctgcccagcagacaatggctgttgctgaagaggatcattatgtgctcaacgggtccaaaatatttattacgaatgcagcttatgcacacgtttacattgttatggcgatgaccgataagtcgcagggtacacgaggaatctctgcttttatcgttgaacgggattttccgggattttccatcggtaaaaaagagaaaaagatggggatccggggatccgcaacctgtgagttgatttttgaaaattgtattgtgcctaaaggaaatatgctgggtaaaccgggtgaaggatttaaaattgcgatgaagacgctcgatggcggacgtatgggaattgcttcacaggccttgggaattgctcagggagccatggatgagacaataaaatatgtgaaagaacggaaacagttcggacgctctatcggacaatttcagaatacccaatttcagttggccgatttaaatgccaagatcgaagctgcccgtttgttggtgcggacggctgcctggaagaaagacaggaaaatcccttactctgtcgattcggcacgggctaagttatttgctgctgaaacagcgatggaagtgacgacaaaagccgtacagtttcacggggggtatggatatacccgtgagtatccggtcgaacggatgatgagagatgccaagattacggagatttatgagggaacctctgaagtacagcggatggtgattgctgctgctctattgaaataataatgttttccgcattgaacttataaaaagagaatacatgaaaatagtagtttgtataaaacaagtacctgatacgacagagatcaaactcgatccggtaacaggaacaatgatacgggatggtgtacctagcattatgaatcccgacgataaaggtggattggaaatggctttggccttgaaaaataaatatggtgcgcaggtaaccgttattacgatgggaccgcctcaggccgatgatattttgcgtgaagcttttgccatgggagccgaccgggcgattcatttgagcgaccgtaagtttgccggtgcagatacattggctacgtcgaatgctattgccggtgctttacggatgctggatttcgacctggtcattaccggccggcaggcgatcgatggagatacggcgcaggtaggacctcagattgccgagcatctcgatttgccacaagtgacgtatgtcgagaatttggaattcgatggtgacaagttgtttacgatccgtaaatctaccgaagaaggatatcaaaccgtacaggtggaatctccctgtgtcgttactgttctggctacggcaaacaaagcgcgctatatgtctgtgcggggaatcgtagaggcatacgatcgggaagtggaaatctggaattttaataatatcagtgtggatgaagctaaattgggattgaacggttcgccgacgcgggtatggaagtcttttaccaaaggagctaaagcagccggaaaagttttcgaagtggaaccggccgaagctgtagatgttattatcgaaaaattgaaagagaaatttattatttaatacatgattttagaggaaaaccgggaataatccggtgaaatctaaagtttaaaatctgatgaagatggataaatctcaatataaagacgtttatgtattcgtagagcaacgggaaggagttattcagaaagttgccatcgaattattggggaaagcccgggagttggccgatagcctgaatgaaaaagtggtggcgatgttgttgggttatgaagtggcgggtcaggcacaggaattgatcgcttatggggccgatgtcgtattgtgtgctgacgaacgggagctggtacaatataataccgagccttacgctcaggcgattacacagattgtacatgagcgtaaacccagtatcgtactgattggagcgacgacgatcggccgggatttgggccctcgtttatccgcccgtttagagaccgggttgacagccgattgtacgggcctcgctgtctcggatgaacgggatttgctgatgacccgtcctgcattcggaggaaatctgatggcgacgattatttgtaaagaacaccggccgcaaatgtcgaccgtacgtccgggagtgatgcgcacgaaaccgaaagatgaacaacgtgccggaacggtagagaaggtgaatattcatttcgataagtcgaaatttaaagtgcggattctcgagacggtgaaagaacaaaagaaccgtatcgatataacagaagcgaagattcttgtatccggaggccgtggtgtaggtaatacggagggatttgagatgctcggaaaattagcggaaacgctgaatgccgaggtttcttcttcacgtgccatggtggatgccggggttatgcctcatgaccgtcaggttggccaaaccgggaaaaccgttcgtcccgatctgtatttcgctatgggtatttccggagctattcagcatttggccggaatggaggaatcggaatttatcgttgccgtgaacaaggataaatatgctccgatttttaacgttgccgacctgggaattgtcggggatgtgaaacagatcgttccgttgctgaccgagaggttggcaaacatccggaaaactgacaaataaaagcccggacatggagtatcaaaaattaatgctggaaaaacaagatcgtgtttgtctggtaaagatcaatcatccggaggcattgaatgccttgaatacggtgatcttgcaggaattggaccgggcattcgatgaaattgcagccgatccggaaaccgatgtggttattctgacaggcgaaggacgttcgtttgttgcgggagccgatattgctgaaatgagtgtgatgaaggccgaagaaggccggcgtttcggtgagttaggggctgctgttttccggaaaatcgaactgatggctaagccggttattgctgccgtgaatggatttgctttaggaggaggatgtgaactggcgatggcttgtgatatccgtatcgcctcggctaaggcgaagttcggtcagccggaagtgggacttgggatcacgccgggattttccggtacccagcgtttaccgcgtttagtcggattaggtaaagccaaagagttgatttatacggctgcggttatccatgccgaggaagcttgccggatcggactggtgaacaaagtggtggaatcggaagaattgatgaatgagtgtatggctatggcaaagactattgctgctaaagcgccattggcggttcgttatgccaaagaagctatcaaccggggagtggaaacggatatggataccggtatcgtcatcgaaaacggtttgttcgggttgtgtttcgcaacgaccgaccagaaggaaggcatggaagcttttttatggaaacgtaaacccgaatttgaagggaattaaaatctttgtaatttaaatttatcgattatgaaaatatgcattgttggaacagggactatgggacatggtattgcccaggtatttgcccaggccggacatgaggtattgttaaaaggccgttctgaagcttctttggcaaaagcccacaaagctatggataaaaatctttccagaatggtggaaaaaggtaaattggaagccggggttaaagatcaggtattggccaggattaaagattcgatgaaatatgaggattgtgccgatgctgatttggtgatcgaggcgatagctgaagatatggctaccaagcatgagatattcaaattgttggacggaatttgtaaaccggaagcgatattggcaaccaatacttcttcgctttctataacggaagtggccgctgtgactaaccgtccggaaaaggtgatcggtatgcatttcttcaatcctgttccggctatgaaactggtggaagtgatcaaaggccggctgacttcggcagaggtgcatgatcaggtatttgctttatcgcaggaaatcgggaaagtgcccgtcagtgtcgaggaagctcctggatttatagtcaaccggattctgatccctctggtgaacgaaggcatcggtatattagctgacggagtggcgaaaaaagaggaaatcgatgccgcgatgaaattaggggctaaccatcctatgggaccattggaactgggtgatttgatcggattggatgtttgtctggctattatggaagtgttgtaccgggaattcggtgactctaaataccggcctcatcctttgttgcggaaaatggttcgcgctaacttattgggacggaagaccggagtcgggttttatgactatcggaaataatgaggagagtcttctttaccgggatacgatgctggggaatatttccccagcatttttactttttccccactttctacaagctgcgattcttaatctgttgtatgtaatatattgataattagtatattttgttgattttgtgcttgtggcatcggatttgtcctgtttaaggacagaatctaactctaaaaaataatagtatgaaaaagatcgtcattttaggaatcggagcttctatgttcttcttgggtagttgcgtagagagttctcagaaatataagtctttacaagcccgtctggattctttgagtacagtacatattatgcagaattccgaaatggagagtatgctggccgatttgaacgatatttctgccggaatgcaatcgttgcgggatgccgaacgtttattgactttggaaacaattaatgaaaataaagccaatagtaaatccaaacagcaattgaatcagctgaaaaaagacgtacaggctattaccgaggcgatcgcttcttataaagaacagatttccaaactcgaaggtaagaataaaagccagtcggccgagtttaaaagattgattgccggcttaaatgcggaattggatcaacgtacacagaaactgaatgaaattactaaacaattggctgagaagaatcagcaattggcagtgaagaccgaggaagtcgctaatctgaccgagaatgtggaagctttggataaagccaataaaagtcagcaaatgacgatcaatgaacaggatatggcgattcatcagggacactatttgattggaaaccgcaaagagctgaaagaagctgaggtaatttccagacaagggattttctgtccgccgatcgtatcgtcacaagcacaaaaagccaactttaccgatttggatatccgtgagatgaaggtgatcccgttgaatagtaaaaaagcgaaattactttctgtccatccggctgattcctatactttggagaccggtgaagatggtaatatgaccctgaaaatcaatgacgaaaataatttctggaaacaaacaaaatacttggttgtgatgattggataaaagcgggaataattttaactgagagaggcatacccaaaaagtatgtctcttttcttttttcacaacgattattcttgtcgagagagaaaataaagaagttttttttgatttaaagacagttcgtttagaaaactagccgaagatcatcaggatttttaaaagtgtatccgatgagaaaatcgctttcaatttgtcgatgcttttgtatttcagtgttttaacactgtttactgagatgttcatttcctgtgctatttgctgattgtcgaggccttgaaaagcgagctgcatgacttgtttactacggggaggtaatttttcgatttccttgatgatctgtaaagcgacatctgtttcgactataacattgaaaatgttcacttctttgagcgaacggctattcacgaatttttcctgtaatttcagttttcttaaccattcgagagagaggttatgtaccaacatatacatataattatcgatgctttcgatttccttctctttggacactaattcccaaagccgtgcaaaagcttcctggacaatgtcctctgatgccgatttatcgttcagaaaccggttggctgcaaaacataaaggagcatacaaccgattcattgtactggcaaattcatttggagaagaatttttaatcccttgttttgctgttgatttcatctttatttaacctgaaagtcgaaaacaaaggtaaaaaattgtaagaatcattcatctttttggaagacttattagtctttaatataaagtgtaattcgatataaaacaaattatgtgtcttgtacaagatcgtcaaaaattgattttgttgttgcaaaaagcttatttcgggcaactctctgaagaagaagccgggctgttggctgagtggcgtagtcggtcttcggaacatgaggcattgtatcggcggatcatgagcggagaaagcctggccgaactgcttgagtggcaaaatcatttcgatccggaacaagcgaatcggtcgattttgcatcgggttgaaaaacgtagatctattcggatgaggaaaataggtttgcgggtagctgctatagttctcctgttgctgggaataggaacgatatggattataaatcgtcagggcgattatagacggcaacaggaattggcttttacattgattcacccaggaactccccaagctattcttactttggcggatggaaggcaagtggtattggataagaaaccggtaaccttgaaattaaatgaaaaacaatttttgaccggagatagtgctatattgaattatgcggttaatctaccgaatggtttggaaaataatgaacagcaaacattaatgcataaggtggaagttccggttggtggtgaatatcggttagtgcttgccgatggtactaaagtctggatcaatgctgaaagttctttgcaatatccggtagagtttactgctgaacagcgaacagtaattttacaaggtgaagcctatttcgaagtcgtttcggatacgctgaaaccttttacggtgaaaacgcctgccggtttggaagtgaaagttaccggtacgcatttcaatgtagaggcatatgccgatcgtagaacatggaaaaccactttagtagaaggaggggtggaagtccggcttggaaaatatcaaacctatctgcgaccgaatgaacaatttagttttgatcaggaaaccaatcagggaagcttgaaaaaagtaaatgtcagggaggtcatcgcctggaaaaatggctggttcgtttttgataatactcctttggaagaaatcatggagacaatacgacgatggtataatatcgaagtagaatatcgggatgctgagacgaaacaattgcgttttacgggtgaccttagtaaatatgattcttttgaatctgtgattcgtatgttcgaagatacacagaaagttaagttaaaagttcgggccaatcggctgatcgtagaaagacattaattcatagaaatagatgatagaatatacctaaaaatggggatttctcttaaatagagctcccattatctttggacctgctaaaatggtcgattcattttgcggatttccgcgaaaacaatggacaggtggtgattgaaaataggtaattattaattaaaacagtaaacatgaaagtaatgtgttatttcaaacaaggaacaatatcccggatgttattcagagggatgttgtttgcattgttggctgtatgttacccggaatattcccgggctgttattgctgaggattatcaggcgaatcggttgattacgctttctatgaagaatatctctgtggctgacattatcgggcaaatccggaaaacgacagattatcgtttcttatttcaggtcgatgacctgaagggagtccggaaagaggttttcgaggtttctgaagcgactatccgggaagcgatggataaattggtggcaggaacatcactgacttatactttgcggcaggacggagtagtcgttttatctcaaacacaacctcaatccagggaatttaccgtttcagggtttgtactcgaggctgaaacccggaaaccgataccctatgccactgtttttataccggatttactgatcggtacttctgcccgggaagacggggcattcacacttaatcatgtacgtcccggaaaattgaaacttgaagttcgttttatgggacggatcagtctggatacggttattcaggtgaatgcgaatgtgacgaatctccgtttttatttgcaggaagaaaatttcaggttgaatgaagtacatattacggccgagaacagcaaagccggacaagctacttcctccaagatttcccgtttggccatggatcatatgcaggcaaccagcctgggagatgtgatgcagttattgccgggtgggttagcaaccaatccgaatctgggatacgcctcccaattgaatctccgtatgatttccgagaatgcttccggcataccgggggtgacggatggagaagaggaagctgccaatatgaatagtttagggactctgattatccgggatggggctcccgtttccaataatgccaatctgcagactgtaagtcctgctatcacaggtgccgggactgctttgggcggaacatcttcaccggccggaggtgtcgatgtccgggctatctcgacagacaatatcgagtccatcgaagtgattcggggaataccttctgtcgaatacggagatttgacttcaggggctgtcattatcaattcgaaagcaggccgggaaccgttccgcttacgttttaaaaccaacgaaaacatttatcaggtatcggctggtaaaggatttaatctgggagggaagaaaggaagcctgaatatcagtggggattacgcttataatgtgacggatcctatgcaatcttatgtatactatcaacgggctgctgcaaaagtgatgtattcgaatatattcttacatgatgttctccgttccaatacttcggtagaggtgatatatggggataataaacggaaacaaaatccggatgatgaacggctccaactgaagagcaacggacgggatctcggtattgcgtttaatacgaacggaatttttgacctggattacggctggctgaaaaatctccgttatacgttggcagtaaattatatgaataagaagagttatgaacaaagattattgacaaatgcaacatatcaatattcgatgacgacgaccgacggtgcaattctgagtaatcggcccggtgtcgatttgtatgacgatcagggaaataagctgaccaatattcctgccggcgaagagacactttatgccaatatgttacccaacgattatcttacccgttatgatatcgaaggaaaagagctgaatgtgtttgctaaagtgatggctaattttgtcaagcaaggcaaccggatcaataaccggattttagtcggggcggattttaaaagcgatggaaacaatggagatggaaagactttcgatccggcgacgcctccataccgggtaaataccagtctgtattcttctttccgcccgcggaaatacagtgatattccgtttgtaaaccaactgggagtatatgcggaggaaaatttcagcctgaattttgccagacggaacctgaatttacagctcggtatacggtatgataaattgttcggacaccaggatatctggacgccccgtttgaatgcttctttagatgtattgccaaaaacatttacgttgagagggggatacggggaaacggctaaaatgcccacagtcctttatttgcatccggagaaggcttatttcgagatggtcaactttgtgagtctgacagatgataagattcccgaagctcaacggttgatgatgacgacgacccgggttttcgatacggaaaacaaagacctggaaattgctaaaaaccggaaagcagaagtcgggttcgatttgaatatcaaaggagtgaggctggcagtcaccgcttttcaggaacgcatgaataacggttattcgatggcttacttgccgactacttttaaatccgtcgaaaacaaacaatacaaaagcggggaattacctgccgatggagtgactgctcctgcgctgaccgaaaaggggacttaccgggtattgatgaaatatatgactcctcagaataacattacaatcaatacgcggggactggaattcgatctgaatctcggacggttcgatgcgattcgtaccgctttttcggtcaatggcgcctggttacggacagaacggttcaataacggttatacctattatgaaaaaggctccgaagatccggccaaagctcctcatgtggggatttatgaagccgctatgcggaaaaattattcagaaagaatggcgacgactttccgggtgacccacaatattcccgatatcgggtttgtggtgacattgtctgctcaggtgttgtggaaagaggccaactggagccgtttcggaaatgattcgatcccagttagttatatctcgaaagaagacgggcaggtatatcctttcgatccggctaaaaaagaggatgctgagtttaccgctatcatgcggacagtcaaccagaaagaccgaatccgggaatccatgcctccgacactctgtatgaatttgtatctgacgaaggaaattaaagactacctaagggtatcgttttttgcgaacaacatgttcagcagtcgtccgctatacaaacaaaaacggactatcggttcctatgaaagaagaaatattccgttattcttcgggttggaactgtcggccattatcaattag

SEQ ID NO: 58 - DNA, 19686 bp, unidentified
  source 1..19686: mol_type = unassigned DNA
ttcccggaaatggctaccctggattgtggcacctgtaatttcggagatgaggtatttgaaaataccatgcctatgatgagggatttcggtaaaagaatgctggaaaaccggatcaaaccggaatacgaatgtttcgagatgggacatctcgaaaccgtattgaatatggcaaagaaaggtcaggtaccgggagctcctatgcagtttaattttgtactcggtgtccccgggtgtacgcctgcaacagttcctaatctttgctggcttgtaaatgctattccggcaggttctacctggactgcaaccggtatcggacgccatgcctttactttggctgctcctgctattgctatgggaggaaatgtcagagtggggttcgaagataatctgtatctcgaaaaaggggtattggctaaatccaatggcgagttggtagctaaggtcgttcgtatcgctaaggaattgggacgcgaaatcgctacctcggccgaagcacggaagatattgaatttgaaagctagaggctaaaaagctagaagctaaaggctaaaaggtataaagtgaaagaagtttaaagtaaatattaaaaaataaaacattatgaaaaaaggaaataaatacggaacgcatagagtaatttcaccgaaaggagtattgccacaaccagctgacaaactggataacaatatggacgaaatctatgataacgagattttgatcgatgtgcaaactctgaatatcgattcggctagttttactcagattgaagaacaagccggaggggataaagctaaaattgccgagatcatgctgggaattgtagagaaacaaggaaaacaccgtaatccggtaaccggttccggtggtatgttactggggacggtggaaaaaatcggagatgctttggttggaaagaccgatctgaaagtgggagataaaatcgctactttggtgtctttgtcactgactccgcttcgtatcgataaaattaaagaaatccgggcagatgtcgatcaggtagatatcgatggtaaagctattttgtttgaaagtggtatttatgcgaagattccggcagatctgcctgagaagttggctttgtcggctctcgatgtagccggtgctccggctcaaaccgctaaattggtgaaaccgggagatacggtattgattatcggtgccggtggtaaatcgggtatgttgtgttgctatgaagcaaagaaacgggctggtgttaccggtaaagtaatcggtttgtgccatagccagagaagtaccgaacggcttcagaaattaggcttctgtgattatgtattctctgccgatgcaacccagccggttccggttatggagaaaattgccgaactgacgaatggtgaaatgtgtgatattacgatcaataatgtgaatattacggataccgagatgaccagcatcttgtgtactaaaaatgacggattggtttatttcttctctatggcgactagttttacgaaggctgctttgggagcggaaggtgtcggtagcgatgtgactatgatcgttggaaatgggtataccaaaggacatgctgagattacattgcaggaacttcgtgaaagcgaggcattacggaagatatttacagagttgtatgcctgaatagtcgggattacaaaatcccgatgaactaaaaatatatttttatggctagcagaagaaaagagtttttccctgaagtgaccgatgaacaatggaacgattggcattggcaggtgaagaataggattgaaaccttggatcaactgaagaaatacatccggctgacaccagatgaggaagagggtatccgtgagtcactgaagacattgcggatggcgatcacgccttattatctgagtctgatcgatcccgataatccttattgtccgatccgtaaacaatcggtaccgaccattgaagaattacatcggtcgccggctgatctggaagatcccttgcatgaagacggtgattcacccgtaccgggattgacccatcgttatcctgaccgggtgttgttcctgatcaccgatatgtgttcgatgtattgccggcattgtacccggcgccgctttgccggacatcacgattgtgccactccattggaaagaatcgataaatgtatcgaatatatcgctaatactccccaggtgagagatgtccttttatcgggtggagatgctttgttggtcagtgacgaacgattggaatatatcatcaaacggttgcgtgaaatccctcatgtcgagattatccgtatcgggtcgagaacaccggtggtgttaccacagcgcattacgccggaattggtaaatatgctccggaaatatcatccgatttggctgaatactcatttcaaccatccgaacgaaattaccgaagagtcggcggcagcttgtgcccggctggccgatgcgggtatacctttgggaaatcagtctgtcctgctccgtggtatcaacgattgtacacatgtcatgaaaaaattggtacacgagttggtcaagatccgggtacgtccttattacatctatatctgtgatctttctgtgggtatcggccatttccgtactcctgtgtcgaagggaatcgagattatcgagaacttgcggggacatacttccggttatgccgtacctactttcgtcgtggatgctcccggtggaggcggaaaaattccggtgatgccgacctatctgatttctcagggccccaatcgggtggtgttgcgtaattttgaaggcgtggtgactacgtataccgaaccgacggattacagagatgaatgccactgtgaagagtgtgagaagcgccgtaaaacagaaggagtggctgagttgctgagcggagaacgcttatctctcgaaccggcgaatctggatcgtaagacacgtaatctattggcgaaaggataaattatttgtgattttggatttaccgtttcatgcgattgaaaggataagtccggtatcataaattaaaatgctgaacagatgggttttgttgatgacatatccgattacaggagtctggcaattgtcggattggagaaaaatacagggaaaacagaatgcctgaattacatccttcgcaggataaaagattcggcagatcggttcgctctgacttcgatcggaattgacggagaaaaccgggatcaggtatgtcaaaccccgaaacccgagattaccgtgccggaaggaatgatattcgttacttcggagaaacattaccgggagaggaagttggtggctgaaatcatggaaatcgatgatcatcggactgctttgggacgattggtcatcgccagggctaaaacttcgggaaaagtactgctttcagggcctgcggatactgccgggttgaaaagtctgatccggcatatgaaagatttcggggtacaaacgaccttggtcgacggggctttgtcccgtttaagcctggcgtctcccaccgttacggaggcgatggtcttagcgacaggggccgctgtttccgggaatattcgggaagtggtgagacgtacccgttatgtttgtgatttgatcgatctggaagaggtggacgaagttttacaagagagattggatgctattcaacaaggtgtatgggcggtcgggccggagggagaatgtattgatctgaaattgccttctgtgtttatgctggagaaaagtggaacagatctgctaaaatatgggcatcggatttttattgccggtgctgtgagtgataaagtatttcagtttttacgcgtacagaaacagaccgtagaattgatcgtccgtgattttacccgtgtttttgccgcacctgagtctttttatgcctttttacgtaagggcggaagagtacaggtgcttcatcgtagccggcttttggccgttacgatcaatcctcaggctccgggaggattacttttggattcgttgcgtttgcagcaagcattggaagaaagcttgcaaattccggtgtatgatgtaaaaaaaatagaaaaagtcggtaaaaaccgttgaggatatgattttaagggaagcgataagacaagtcaggggattccgttatatgatcgaacaattggatatctgttcggccgtaggccgtagggtattgtatgatctgccctggctcgattcgaaacctcggttggaggccgaatttgaacgcgttcaaaagatcatggtgctttttgaacaacctgaaaatgaatcccgtctggaacgtttgactggtaagctgatgcaggtgagagatatacgggggacgatcgggcggatggcgatggagcaagtgttggatgatcttgaattgttcgaattgaaaacttttgctttgtgttcggaagaaatcaggggacttgtcgaagaatggcggatcgttttactcccggaactggagccggttgtacgtttgttggatccggaagggaatcggattcctcatttttatatttatgatacttattcggctgagctggccaggctgagagctgaaataaaacaaaagagctttcaaggggcagaagaacgggaattagaagcgttgtatgtacaaagtgtggttttggaagacaaggtacgcgaagagttgtctgtgcagttgagaccttatcacgacgatttgaaacaggctttggaagcggtcggattgctggatgtcgtattggcaaaagccagacaagcaataaaaggacaattgactttaccgcaaattccggaagagggggaaatggtgttcgaaggtcttttccatcctcagatccgggagattttagaacaggaaggaagagcgtttcagactgtagatttgaaattggaaaagggagcgacggtgattaccggagccaatatggccggaaagacagtgttgttgaaaagtgtgcaactggcgcaatacctgatgcagttcggtttttatgtacctgcccggcgggcgggtatgccgctcgtggaacaagtcttgaccagtatcggggatgatcaggatgaattgaacggtctctcttcttatgcggctgagatgttgcgggtggatgaaatgatccggcaagtcaggcagcgaagtaaaattttggtgctgatagacgaattggcccggacgaccaatcccgtcgagggacgggcaattgtgaatggggtagtggattttttgactactcaccgggtgatggctatggtcactacccattatagcggaataacggccgagtgccgtaaattgagagtgcggggattcgtagagaatcggattgaagggaatataaccctgaaaaatatcaatgagtttatcgattattcactcgaagaagacagcggaaaagaagtcccccaggaggcgatgcgtattgcctggatgctgggggtcgaccgtggagtgttggaacgggtggaaaattatttgcaggaagaaaatcctgatcggaaaaagacagtacagtagaaaggaaatatatatgaaaagtaaattaggaatagattttgataaagtcggacatgcccgtgaaatagcccgtaagattgctgaccaggtgcaggattttgtggatggctatacgacagtggctgtcgaaaggacattgtgtcgtttgctgggtatcgacggagtggatgttcatgctgtccctctgccgaacatcctggtagacgagctgaaagaaaagaacgtgttgggagaaggaattttattctttctgggtaatgtaatggtggaaaccggaatgactccgcaggaaatagccgaacaagtagctgccgggaaagtagatgtcacccgggtaccggtatgtactcccggccagcgggaaaaagcgctgcaaccctatatcgaggccagtatccggcggatttccgacaaccggaaacggcgtgagaattatatcgcaacgatcggagagggagcaaagccttatctttatgtaattgtcgctaccggtaatatttacgaagacgtggtacaggcacaggcggctgcccggcaaggggcggatgtcattgctgtgatccgtacaacagggcaaagtttgttggattatgtaccctatggggctacgacagaaggattcggcggaacttttgccacccaggaaaattttcggattatgcggaaagctttggatgaggtcggagaagaagtcggtcgttatatccggttgtgtaactattgttccggtttatgtatgccggagattgctgtgatgggagctctggaagggctggatgtgatgttgaacgatgcattgtatggcattttattccgggatatcaatatgcagcggacgttggtcgaccagtttatgtcgcgggtgatcaacggctttgccggagtgattatcaacacaggcgaagataactacctgactactgccgacgctgttgaagaagcacatactgttttggcttccgatctgatcaatgaacaattggctttgttggccggactaccggaagaacaaatgggcttgggacatgcttttgaaatggatcccatgctggaaaacggctttttgtacgaattggctcaggcccagatgacccgggaaatttttccgaaggctactttgaaatatatgcctccgacgaaatttatgaccggaaatattttccgcggacatattcaggatgctcttttcaatatgatcggaatctggacttcacaaggtattcaactattgggaatgccgaccgaagccatacatactccatttatgtcggatcgttatctgtcgatcgagaatgcccgttatatttttaataatatgaaaaatatcggagatgaagtagtctttaaagaaaacgggattatacaaaacagggcgaaagaagtgttggataaagctaccgttctcttggaaaagattgaacgggaaggactttttacagccttggaaaaaggaatttttgccgatatcaagcgtcccaaaaacggaggaaaaggattggacggcgtttgtgccaagggaaagaactatagcaatccttttgtagagatcatgatgaacagataacaaaaatcgtaaatcaaataaagattatgagcggaggtttatattcaacagaagggagagatttcgatcaaaccctcgatctgaaaaagataaaaccctacggggatacgatgaatgacggaaagacacagctgagtttcactttacctgtacctgccggagatgaagcgatagaggctgctaaacagttgatgaaaaaaatgggatttgaaaatcctcaggtggtgtttcatcaggaactgacgaaaggatatactttttttaattgttatggaagttgtgtacacacggtagattatagtaatatctatgtgccgaaagtggaatcgaccaagtgggatatgggagagaccgatcagtttgtccgggaacatatcggtcggaaaattgtggtgatcggagctagtaccgggacagatgcccatacggtgggaatcgacgctattatgaatatgaaaggttttgccggacattatggtttggaacggtatgaaatgttcgaagccttgaatatgggtagccaggtgaccaacgaggaatttatcgctaaggctatcgaattgaaagccgatgctttattggtttcgcagaccgtgactcagaaagatattcatattaaaaatctgacggaacttgtggagatgttggaagccgaaggattacgggacaaagtgatcctggcttgtggtggtccccggatttcacatgagttggcgaaagaattggggtacgatgccggcttcgggatgaatacctatgccgacgatgtcgcctcgtttattgcgcaggaattggatcgaagaatgaatcattgaaaatatacaagctatggaaaaagaacaaatcagggaagtgattgccaggagagtggcaatggaactccacgatggagacgtggtgaatctgggtatcggtttgccgactttagtgccgaattatctgcctgaaggtgtcgaggttatcttacaaacggagaatggattgatcggtatggggccaactcctgctccgggagaagaagatccggacttgatcaatgccggcggtggagcgataacggctctgcccggagcggccagcttcgatagtgctacttcgttcggtattatccggggcggacacgtagatgtcagtatcctgggggccttgcaagtagatgaaaaaggagatttagccaactggatgataccggggaaaaaaacaccgggaatgggaggagcgatggacctgctgatgggagccggtaaggtgatcctggccatggaacatacggcaaaaggaaatccgaaaatcctgaaaaaatgtactttacctttgacagccaagggacaggtgaatatgatcgttacagaaatgggagttatggagatcacatccgggggaattgtactgaaagagatacatcctgagtttacggtagaacaggtgcaggcagctacagaagcaactctgatcgttgccccggatttaaaaaagatgtgctgaacgacgaaagcgtattgaaggaaatcacgatggaggatggatggtggatacctctagcccgaatcgtaaactataaattaaaaaaggtatggatttttcattatcaaaaaaagagatattgtttcagcagatgatcagagcatttgctgagaaagaagtaaaaccgctggcggcagaagtggacgaagaagagagattccctgtcgaaacggtagaaaaaatggcgaaactggggattatgggtattcctttcccggtggaatatggtggagccggtggtgataacgtattgtattctatggctgtagaggaattgtcccgggtatgtgcgacgaccggagttattgtttctgcccatacctctttgtgtgcttctccgatctatgaattcggaaatgaagaacaacggaaaaaatatttacctaaattatgttcgggagaatggataggagcttttggtttgaccgaaccgaatgcaggtaccgatgcctctgcccagcagacgatggctgttgctgaagaggatcactatgtgcttaacgggtccaaaatatttattacgaatgcagcttatgcacacgtttacatcgttatggcgatgaccgataagtcgcagggtacacgaggaatctctgcttttatcgttgaacgggatttcccgggattttccatcggtaaaaaagagaaaaagatggggatccggggatctgcaacctgtgagttgatttttgaaaattgtattgtgcctaaagaaaatatgctgggtaaaccgggtgaaggatttaaaattgcgatgaagacgctcgatggcggacgtatgggaattgcttcacaggccttgggaattgctcagggagccatggatgagacaataaaatatgtgaaagaacggaaacagttcggacgctctatcggacaatttcagaatacccaatttcagttggccgatttaaatgccaagatcgaagctgcccgtttgttggtgcggacggctgcctggaagaaagacaggaaaatcccttattctgtcgattcggcacgggctaagttatttgctgctgaaacagcgatggaagtgacgacaaaagccgtacagttccacggggggtatggatatacccgtgagtatccggtcgaacggatgatgagagatgccaagattacggagatttatgagggaacctctgaagtacagcggatggtgattgctgctgctctattgaaataataatgttttccgcattgaacttataaaaagagaacacatgaaaatagtagtttgtataaaacaagtacctgatacgacagagatcaaactcgatccggtaacaggaacaatgatacgggatggtgtacctagtattatgaatcccgacgataaaggaggattagaaatggctttggccttgaaagataaatatggtgcacatgtaaccgttattacgatgggaccgcctcaggccgacgacattttgcgtgaagcttttgccatgggagccgaccgggcgattcatttgagcgaccgtaagtttgccggtgcagatacattggctacgtctaatgctattgccggtgctttacggatgctggatttcgacctggtcattaccggccggcaggcgatcgatggagatacggcgcaggtaggacctcagattgccgagcatctcgatttgccacaagtgacgtatgtcgagcatctggaattcgatggtgacaagttgtttacgatccgtaaatctaccgaagaaggatatcaaaccgtacaggtggaatctccctgtgtcgttactgttctggctacggcaaacaaggcgcgctatatgtctgtgcggggaatcgtagaggcatacgatcgggaagtggaaatctggaattttaataatatcagtgtggatgaagctaaattgggattgaacggttcgccgacgcgggtatggaagtcttttaccaaaggagctaaagcagctggaaaagttttcgaagtggaaccgaccgaaggggtagatattattatcgaaaaattgaaagagaaatttattatttaatacatgattttagaggaaaaccgggaataatccggtgaaatctaaagtttaaaatctgatgaaaatggataaatctcaatataaagacgtttatgtattcgtagagcaacgggaaggagttattcagaaagttgccatcgaattattggggaaagcccgggagttggccgatagcctgaatgaaaaagtggtggcgatgttgttgggttatgaagtggcggatcaggcacaggaattgatcgcttatggggccgatgtcgtattgtgtgctgacgaacgggagctggtacaatataataccgagccttacgctcaggcgattacacagattgtacatgagcgtaaacccagtatcgtactgattggtgcgacgacgatcggccgggatttgggccctcgtttatccgcccgtttagagactgggttgacagccgattgtacaggcctcgctatctcggatgaacgggatttgctgatgacccgtcctgcattcggaggaaatctgatggcgacgattatttgtaaagaacaccggccgcaaatgtcgaccgtacgtccgggagtgatgcgcacgaaaccgaaagatgaacaacgtgccggaacggtagagaaggtgaatattcatttcgataagtcgaaatttaaagtgcggattctcgagacggtgaaagagcaaaagaaccgtatcgatataacagaagcgaagattctcgtatccggaggccgtggtgttggtaatacggagggatttgagatgctcggaaaattagcggaaacgctgaatgccgaggtttcttcttcacgtgccatggtggatgccggggttatgcctcatgaccgtcaggttggccaaaccgggaaaaccgttcgtcccgatctgtatttcgctatgggtatttccggagctattcagcatttggccggaatggaggaatcggaatttatcgttgccgtgaacaaggataaatatgctccgatttttaacgttgccgacctgggaattgtcggggatgtgaagcagatcgttccgttgctgaccgagaggttggcaaacatccggaaaactgacaaataaaagcccggacatggagtatcaaaaattaatgctggaaaaacaagatcgtgtttgtctggtaaagatcaatcatccggaggcattgaatgcattgaatacggtgatcttgcaggaattggaccgggcattcgatgaaattgcagccgatccggaaaccgatgtggttattctgacaggcgaaggacgttcgtttgttgcgggagccgatattgctgaaatgagtgtgatgaaggccgaagaaggccggcgtttcggtgagttaggagctgctgttttccggaaaatcgaactgatggctaagccggttattgctgccgtgaatggatttgctttagggggaggatgtgaactggcgatggcttgtgatatccgtatcgcctcggctaaggcgaagttcggtcagccggaagtgggacttgggattacgccgggattttccggtacccagcgtttaccgcgtttagtcggattaggtaaagccaaagagttgatttatacggctgcggttatccatgccgaggaagcttgccggatcggactggtgaacaaagtggtggaaccggaagaattgatgaacgagtgtatggctatggcaaagactattgctgctaaagcgccgttggcggtccgttatgccaaagaagccatcaaccggggagtggaaacggatatggataccggtatcgtcatcgaaaacggtttgttcgggttgtgtttcgcaacgaccgaccagaaggaaggcatggaagcttttttatggaaacgtaaacccgaatttaaaaggaattaaaatctttgtaatttaaatttatcgattatgaaaatatgcattgttggaacagggactatgggacatggtattgcccaggtatttgcccaggccggacatgaggtattgttaaaaggtcgttctgaagcttctttggcaaaagctcacaaagctatggataaaaatctttccagaatggtggaaaaaggtaaattggaagccggggttaaagatcaggtattggccagaattaaagatacgatgaaatatgaggattgtgccgatgctgatttggtgatcgaagcgattgctgaagatatggctaccaagcatgagatattcaaattgttggacggaatttgtaaaccggaagcgatattggcaaccaatacttcttcgctttctataacggaagtggccgctgtgactaaccgtccggaaaaggtgatcggtatgcatttcttcaatcctgttccggctatgaaactggtggaagtgatcaaaggtcggctgacttcggcagaggtacatgatcaggtatttgctttatcgcaggaaatcgggaaagtgcccgtcagtgtcgaggaagctcctggatttatagtcaaccggattctgatccctctggtgaacgaaggcatcggtatattagctgacggagtggcgaaaaaagaggaaatcgatgccgctatgaaattaggggctaaccatcctatgggaccattggagctgggtgatttgatcggattggatgtttgtctggctattatggaagtgttgtaccgggaattcggtgactccaaataccggcctcatcctttgttgcggaaaatggttcgtgctaacttattgggacggaagaccggagtcgggttttatgattatcggaaataatgaggagagtcttctttaccgggatacgatgctggggaatatttccccagcatttttactttttccccactttctacaacctacgattcttaatttgttgtgtgtgatatattgataattagagtattatgttggatttgtgcttgtggcatcggatttgtcctgtttaaggataaaatctaactctaaaaaataatagtatgaaaaagatcgtcattttaggaatcggagcttctatgttcttcctgggtagttgcgtagagagttctcagaaatataagtctttacaagcccgtctggattctttgagtacagtacatattatgcagaattccgaaatggagagtatgctggctgatttgaatgatatttctgccggaatgcaatcgttgcgggatgccgaacgtttattgactttggaaacaattaatgaaaataaagccaatagtaaatccaaacagcaattgaatcagctgaaaaaagacatacaggctgttaccgaagcgatcgcttcttataaaggacagatttccaaactcgaaggtaagaataaaagccagtcggccgagtttaagagattgattgccggcttaaatgcggaattggatcaacgtacacagaaactcaatgaaattactaagcaattggctgagaagaatcagcaattgacagtgaagaccgaggaagtcgctaatctgaccgagaatgtggaagctttggataaagccaataaaagtcagcaaatgacgatcaatgaacaggatatggctattcatcagggacactatttgattggaaaccgcaaggagctgaaagaagctgaggtaatttccagacaagggattttctgtccgccgatcgtatcgtcacaagcacaaaaagccaactttaccgatttggatatccgtgagatgaaggtgatcccgttgaatagtaagaaagcgaaattactttctgtccatccggctgattcctatactttggagaccggtgaagatggtaatatgaccctgaaaatcaatgacgaaaataatttctggaaacaaactaaatacttggttgtgatgattggataaaagcgggaataattttaactgaaagaggcatacccatcgggtatgtctcttttcttttttcacaacgattattcttgttgagagagaaaataatgaagtttctttgatttaaagacagttcgtttagaaaactagccgaagatcatcaggatttttaaaagtgtatccgatgagaaaatcgctttcaatttgtcgatgcttttgtatttcagtgttttaacactgcttactgagatgttcatttcctgtgctatttgctgattgtcgaggccttgaaaagcgagctgcatgacttgtttactacggggaggtaatttttcgatttccttgatgatctgtaaagctacatctgtttcgactataacattgaaaatgtccacttctttgagcgaacggctgttcacgaatttttcctgcaatttcagttttcttaaccattcgagagaaaggttatgtaccaacatgtacatataattatcgatgctttcgattttcttctctttggacactaattcccaaagccgtgcaaaagcctcctggacaatgtcctctgatgccgatttatcgttcaaaaaccggttggctgcaaaacataaaggagcatacaaccgattcattgtactggcaaattcatttggagaagaatttttaatcccttgttttgctgttgatttcatctttatttaacctgaaagtcgaaaacaaaggtaaaaaattgtaagaatcattcatctttttggtggacttattagtctttaatataaagtgtaattcgatataaaacaaattatgtgtcttgtacaagatcgtcaaaaattgattttgttgttgcaaaaagcttatttcgggcaactctctgaagaagaagccgggctgttggctgagtggcgtagtcggtcttcggaacatgaggtattgtatcgacggatcatgagcggagaaagcctggccgaactgcttgagtggcaaaatcatttcgatccggaacaagcgaatcggtcgattttgcatcgggttgaaaaacgtagatctgttcggatgaggaaaataggtttgcgggtagctgctatagttctcctgttgctgggaataggaacgatatggattataaatcgtcagggcgatgatagacggcaacaggaattggcttttacatcgattcacccaggaactccccaagctattcttactttggcggatggaaggcaagtggtattggataagaagccggtaaccttgaaattaaatgaaaaacaatttttgaccggagatagtgctatattgaattatgcggttaatctaccgaatggttgggaaaataatggacagcaaacattaatgcataaggtggaagttccggttggtggtgaatatcggttagtgcttgccgatggtactaaagtctggatcaatgctgaaagttctttacaatatccgggagagtttactgctgaacggcgaacagtaattttacaaggtgaagcctattttgaagtcgtttcggatacgctgaaaccttttatggtgaaaacgcctgccggtttggaagtgaaagttaccggtacgcatttcaatgtagaggcatatgccgatcgtagaacatggaaaaccactttagtagaaggaggggtggaagtccggcttggaaaatatcaagcccatctgcgaccgaatgaacaattcagttttgatcaggaaaccaatcagggaagcttgaaaaaagtaaatgtcagggaggttatcgcctggaaaaatggctggttcgtttttgataatactcctttggaagaaatcatggagacaatacgacgatggtataatatcgaagtagaatatcgggatgctgagacgaaacaattgtgcttcacgggtgatctgagtaaatatgattcttttgaaacggtgatccgtatgtttgaagatactaagaaagttaagttaaaagtgcaagccggccggttgatcatagaaaaatactaattcataggaataaattataaaatatacctaaaaatagggatttctcaacttcgggtatcccgttatttttggacctgctaaaagggtcgattcattttgcggatttccgcgaaaacaacggacaggtggtgattgaaaataaacaattattaactaaaacagtaaacatgaaagtgatgtgttatttcaaacaaggaaccatatcccggatgttattcagagggatgttgtttgcattgttggctgtatgttacccggaatattcccgggctgttattgctgaggatcatcaggcgaatcggttgattacgctttctatgaagaatatctctgtggctgatattatcggacaaatccggaaaacgacagattatcgtttcttatttcaggtcgatgacctgaagggagtccggaaagaggttttcgaggtttctgaagcgactatccgggaagcgatggataaattggtggcaggaacatcactgacttatactttacgtcaggacggagtggtcgttttatctcaaacacaacctcaatccagggaatttaccgtttcggggtttgtactcgaggctgaaacccggaaaccgataccttatgccactgtttttattccggatttactgatcggtacttctgcccgggaagacggggcattcacgctcaatcaggtacgcccgggaaaattgaaacttgaagttcgttatatggggcggatcagtctggatacggttattcaggtgaatgcgaatgtaagggatctccgtttttatttgcaggaagaaaatttcagattgaatgaagtacacattacggcggagaacagcaaagccggacaagctacctcctctaagatttcccgtttggccatggatcatatgcaggcaagcagcctgggggatgtgatgcagttattgccgggtgggttagcgaccaatccgaacctagggtatgcttctcaattgaatctccgtatgatttccgagaatgcttccggcataccgggattgacggatggagaagaggaagctgccaatatgaatagtttagggactctgattatccgggatggggctcctgtttccaataatgccaatctacagactgtaagtcctgctatcacaggtgccgggaccgctttgggcggaacatcttcaccggccggaggtgtcgatgtccgggctatctcgacagacaatatcgaatccatcgaggtgattcggggaataccttctgtcgaatacggagatttgacttcgggagctgtcattatcaattcgaaagccggccgggaacccttccgcttacggtttaaaaccaacgaaaacatttatcaggtatcggctggaaaggggtttaatctgggagggaagaaaggaagcctgaatatcagtggggattacgcctataatgtgacggatcctatgcaatcctatgtttattatcagaggggagctgcaaaagtgatgtattcgaatatattcctacatgatgttctccgttccaatacttcggtagagttgatatatggggataataaacggaaacaaaatccggatgatgaacggcttcaactgaagagcaacggacgggatatcggtatttcgttcaatacaaacggaatttttgacctggattacggctggctgaaaaatcttcgctatacattggcagtaaattatatgaataagaagagttatgaacaaagattattgacgaatgcaacgtatcaatattcgatgacgacgaccgacggtgcaattctgagcaatcggcccggtgtcgatttgtatgacgatcagggaaataaactgaccaatattcctgtcggcgaagagacgctttatgccaatatgttacccaacgattatcttacccgttatgatatcgaagggaaagagttgaatgtgtttgctaaagtgatggccaattttgtcaagcaaggcaaccggatcaataaccggatattagtcggagcggattttaaaagcgatggaaacaatggagatggaaagactttcgatccggcgacacctccataccgggtaaataccagtctgtattcttctttccgcccgcggaaatacagtgatattccgtttataaaccaactgggagtatatgcggaggaaaatttcagactgaattttgccaggcggaacctgaatatacaattcggtgtacggtatgataaattgttcggacaccaggacatctggacgccccgtttgaatgcttctttagacatattaccaaagatatttacgttgagaggaggatacggagaaacagctaaaatgcctactgtactttatttacatccggagaaggcctatttcgagatggtcaactttttgagtctgacggatgacaagattcccgaagctcaacggttgatgatgacgacaacccgggttttcgatacggaaaacaaagacctggaaattgctaaaaaccggaaagcagaagtcgggttcgatttgaatatcaaaggagtgaggctggcagtcaccgcttttcaggaacacatgaataacggttattcgatggcttacttgccgactacttttaaatccgttgaaaacaaacaatacaaaagcggggaattacctgccgatggagtgactgctcctgcgctgatcgaaaaggggacttaccgggtattgatgaaatatatgactcctcagaataacattacaatcaatacgcggggactggaattcgatctgaatctcggacggttcgatgcgattcgtaccgctttttcggtcaatggcgcctggttacggacagaacggttcaataatggttatacctattatgaaaaaggctccgaagatccggccaaagctcctcatgtggggatttatgaagccgctatgcggaaaaattattcagaaagaatggcgacgactttccgggtgacccacaatattcctgatatcgggtttgtggtgacattgtctgctcaggtattgtggaaagaggccaactggagtcgtttcggaaatgattcgatcccagttagttatatctcgaaagaagacgggcaggtatatcctttcgatccggcgaaaaaagaggatgctgagttttccgctatcatgaggacagttaaccagaaagaccgaatccgggaatccatgcctccgacactctgtatgaatttgtatctgacgaaggaaatcaaagactacctaagggtatcgttttttgcgaacaacatgttcagcagtcgtccgctatacaaacaaaaacggacgatcggttcctatgaaagaagaaatattccgttattcttcgggttggaactatcggctatcatcaattag

SEQ ID NO: 59 - DNA, 7431 bp, unidentified
  source 1..7431: mol_type = unassigned DNA
atgtctctttccgaagaagcaatcactcttcagcgtgctgcgcacgaactgatgtatttgggtatggacggcagtcccgtctatagcgatgacttgtcacggcggaacggtgaggtctaccgtcttaccatggctttataccggtcgggtgtaaaaggcactaccatcgaagagcaggcaaatgtctgtcttgcccttcttatgggttacagcgcctcttttgtggaccatggcgaaaagcagcagcatgtccaggaagtgctggactgttgttgggatgtgctcgacgcccttcccgcttccttactgaagctccgtctgcttaccgcctgctacggtgaagtgttcgacgagtctttggccgacgaaggccgttccatcatcgcctcctgggattccttatcacttactcccgaacagcaggaagcggttgatgaatttcagaatgtgacagacaatccctatccatgggaatatatcgatgaataaaacttttcatataatgcttaacaataaatccgtattgattaccggaggaacgggttccttcggaaagaagtttgtggaaaccattctccgtgattatccgcaagtaaagaaaattattatttactcccgcgatgagctgaagcaatttgagctgaaacagaaatatcccggtcataagtatccgcaactgcgtttctttatcggtgatgtccgtgacctcgaacgcctgacgcgggcttgcgaaggagtggacgtgattatccatgcagccgccatcaagcaggtggataccgctgaatacaatcccgaagagtgcatcaaaaccaatgtacacggtgcgcagaatgtgataaaggctgctcttgccaccggtgtacagcatgtggtggccctttctactgacaaggcttgtgcccccattaatctttatggcgccaccaagctcacttccgacaagctgtttactgctgccaacaatatcagcggttccaagaacatccggttctccgtagtccgttatggcaatgtgatgggttcccgcggttccgtaatccctttctttatcaacaagcgtgacaacggggcgaaggaacttcccataaccgatatgcgcatgacccgtttcaacatttcactggaagccggtgtcgctttggtcatgtatgccatcggacatcacctgggtggtgaaatctttattcctaagattccttcctatcatatccaggacgtggctaccgccattgcacccaatctgccgcaggtggaagtgggcatccgtccgggagagaaactgcacgaggagatgattactgtaaccgatgctcttgatacaatcgatttgggcagatattatgtcattcttccttccgtatctttcaagcacagtcgcgaagagttcatcagacatcacaatgcagtacccgttcccgacggtttccactacagcagtgacaacaatacggagtgggagacagtagagactatgcgcgagaatatcaagaaatacgttgaccctaatttcgaggtgaaatgataagcaagcctattccatacggtcgtcagcatatcacagatgaggacatccgggcagtcatcgataccctgaaaagcgattacctgacacaaggtcccaaaatcagggaatttgaaacgaaatttgccgaatatgtaggtgcacaatatgccgtagcggtgaacaatgctacttcggggcttcatcttgcagctaccgcactgaatgtaaagccgggtgacaaggtgattgtcactcccatgacctttgctgccagtgccaactgcattcgctattgtggcggcgaggtggtattctgtgatattgacaaggatacttacctcatggatatccgtaaactcgaagccatgcttaaagcttctcctcgcggtacttacaaaggtattgttccggttgattttgcaggctatcctttggatctggaagagttcagaaagcttgccgacgagtacggtttgtggattatcgaggatgcctgccatgctcccggcggctatttcatggacagtaaaggcaagaaacaacattgtggtaacggttgttttgccgactgtgccgtattctctttccatcccgtgaaacatatcgctacgggtgagggaggcatggtgaccaccaacagcaaggagctctatgacaagctttgtctttaccgtacgcatggcattacgaaagaccctgctttattgcacgagcatcatggtggctggtattacgagatgcaggagttagggtataattaccgtctgactgattttcaggctgccttgggtatttctcagctggagcgtgcgaaagcaggtcttgaacgtcgtcatgaaatcgtaagacgctataatgaagcgttttccggaatagatggtatcaagactccgttcaatactgccgatgtctatcatgcttatcacctttatatcattcaagtagctgaccgcttgggtctttataattatctgcacgagaacaatgtctatgcgcaggttcattatgctccgcttcatctgatgccttactatcagcagtggggcaataggaaaggcgatttacctatagtagaagagtattacgaacattgtctgagtcttccgatgtatcccacgctgacggacgaggaacaggagtatgtgattgaaaaggttatagaatttgtagcgaaatgaaaaatatagcaatcattcctgcacgtggcggcagtaaacgtattccgcgtaagaatatcaagccctttatgggtaaacctatcattgcatattccatagaggcagctttacaaagcggtctttttgaggaggtgatggtttctaccgatgatgaggagattgccggaatagcttgtaagtatggtgccaaagttccttttatgcggagtgccgagatgtcaaatgactatgccggtactgatgatgtaattcttgaagtactgaggaagtataaagagcaaggcagggagtttgaaacggtttgttgcatttactcaacggctccttttgtcactcccgaaagactccgggaagcatacggaaaaatgaattcggagatagattccgttttcacttgtgtggcttattcctatcctatacagcgcagccttcacatcgtggatggaaaaattagtatggtttatcccgaatacaaaaatgcacgttcccaagatttagaaccgatttatcacgatgccggtcagttctatttctctcgcactgctccctttgtggagagccggactttttggggtgagaatacagccgggttggtgctttccgaacttgaagtgcaggaccttgatacacagactgactgggcattggcagagatgaagtatgagttgcttcataaatgatgtaatgcagaaaatctatctccgtgccgatgcaagtgctgccatcggctacggtcactttattcgtactctggctttggccgatatgctgaaggacgattttgattgtaccttctttacttgccatcctaccccttatcaggtgagtgagatggagaaggtatgtcctttcatccccttacaggaagaatcacattatgatgagttcctttcccttttgcaaggtgacgaaattgtggtacttgacaactatttctttactactgattaccagcgtgccatcaagcaaaaaggttgctgtctggtgtgtgtggatgatatgcacgacaagcactatgtggctgatcttatagtcaatcagggattgggttacacgcgtgatgactattcgtgtgaaccatatactcaatttgcctttgggcttcaattttcattgttgaggaggcctttcttcaatgttgcgctgcagaataaacggaacaattattcaggagatttatatgtattggtggcttttggtggttctgatttcttgaatttgacgtatcagaccattcatgcaattaaagccaaagacaatgtgaagaagataacggcaattgtcggtgattcgtatgcagccgagaatatggttgatgaccccaaagtaacctatcagaagaatttgtctgccggttccattgcagacttgtttagtactgtagatgtcgccatattgcctgcctctacgatgatgaatgaggcattggcctgtggaactcctgttataggagggtattatgttgataatcaggagcacgactattatatgtttttgcgtgaagggctgattcagggggcgggtgattataccgatgccgctgcctttactcttgttgctgagaatttggataagatggccattcgtaaaagacatgccatcactccggatattcccaaacggtttgtcaatttgtttaaaagtctgttgatatgcaagtaacttcacaaagagcttcggccatattgtataattatctgtctggcaaccattttgataaaccgttcttattgccggcaaatgtgtgtcctgtagtgcccctgtcgtttatgaaagcaggtgtcggttttgagtttatagacatagatgaaagccatgccatgtcaaccgagaaatgtttgacagctatagaggcgggaaaatattccggtcttgtatttgtgcatgcctacgggaaaaagtatgacaacaaagaattttaccgggcagtgaaaagtctcgatccaaatctttgtatcattgatgattgttgcttgtgcattcccgaattggcagattccttgcctgaaaatgtggatctctgcctttacagtaccggatatgccaaattcatagaactttcctatggtggctatgcaagttttagggggggtacgaagttgttgattatcagtatgatagcattagtgaacaaaagcattcggtatatataaggaaatgtctcctggagaatgtcagatatatgcttccggctgactatccttggctggacgcctcaaatttgcaaatgaccgatgaggaatattttgacatcattgaaagaaagctcccaaaagtgattgcggaaaaagagaaaataaacaagatatacaggaatctgcttcctgaatcgattcagatgggagatgatttccagaactggaggttcatgattgtcatcgagaaccggcagaaggttcttgacgcaatattcaaggccggtctgtttgccgggactaatttcccttcggtttcatacatgttcaaaggtgtttcttctcctgttgcggaagtggaggcgaagtatatcgtcaatttgtttaatgatttccggttcagtgaagcacaggcaagaaagatctgtgatgtgataaattcggttatatgaataaaagattattgatactgggcgcaggtgaaatgcaggttcctgtcatccgaaaggcgaacgatatgggattgcataccatagtcgcagatatggatgcgaatgctccgggaatggggtacgcctcggaaccggttcttgtcagcacgatggataaggaaggtgttttggaatgtgccaaacgtcactctgttgacggcatacttactacaagtgacgcgcctgtaaatgtggtttcctatgtcggggaacagctggggcttccgtccatgtccactgaggtcgcaaaaatctgtacaaacaaatacttgcagagggaaatgtttgcggccaacgggattgatgtaccatttttcatgctttgtgataaagatacggacttgggcacattgcaagattatccatatattgtcaaaccggtagattcctctgcaagccgcggagtaaaaaaggttacaaatcataaagaacttgtacttgctttttccgaagctctcggttattcccgtaccggaaaggccattgtcgagggctttataacaggccgtgaattcagtgttgaaacatatacgcaaaacaataaaactaccgttgtcactattacggagaaactttgtatcggtgaggcagaaggcttctttgttgaagatacgcacattgaaccggcgcgtataacgaaacaggagtgggagctggtttcggagaccgtatcaaaagcactttgcctgattggacttaataattgcccctcgcatacagaaataaagctgaatgaatcgggcgcttatatcatagaaattgcttgtcggcttggaggagattatataacctctgatttggttccattgtcaaccgggatagatatgcagagaaatctggtgaactgttctcttggtttgcccgttgatgtccttcgcaaacatgaaaaatgctcagcggtacagttccttaatccgctcaactatcagcgttgtgtggattttctaagctcttcccggtcatcggctgtttttcggtctgaaataagaccttattctgaaaaaaaataaaaaactctttagaccgtttagggtatatcatacttcagactgatagtatggaagagcttgaaagtattctaaggacgattaaatagtaaagacatgagagataagtgtatgattgtggctgagatgtctgccaaccataacggtaagaaagaaacagccattgaaaccgtcagggctgcaaaacgtgccggagccgatgccgtcaagttgcagacctatcgggctgataccattacgcttcgctgtgacaagcctgattttataattaatgaaggctctatatgggacgggcaatatttttatgatttgtatgaacaggcttatactccttgggagtggcatgaagagttgttccatgtggccaaggaagaaggactgatctgtttttcttctccttttgataagacagccgtcgatatgcttgaggctttggactgtcccgtttataagatagcttctttcgaaattacggatattccattgatagaatacgcggcttcgaagcataagccgatggtacttgctacaggcatagccaccgaagaagatattcaattggctgttgaagcttgccgcagaatgggaaataatgatattacggttcttaagtgtacctcttcttatccggctccagttgaggaagccaatctttgtatgattcgtgatttggcagaacgtttccaggtaaaaagtggactttccgaccataccctggggagtgtctctcccattgtggcggttactcaaggtgcgagtatgatagaaaagcactttattttgaatcgttccatcggtggtccggattgttctttttctatggaagagaaagattttgcccaaatggtaaaagatgtgcgcatggctgagttatctttggggaaaacgacttacgaattgacggagaaaatgagaggtagccgttccgcatcacgttctctctatgtggccgaggatatgaaggccggagaagtgattacggagcggaacgttcgctccgtccgtccgggcttcggcctgcaccccaaatatctgaaagatatattgggaaagaacgtgaaccgggatttggagaaagggacgaggtttgcattggagtacgtgaatggttag

SEQ ID NO: 60 - DNA, 8535 bp, unidentified
  source 1..8535: mol_type = unassigned DNA
tcttgtgagcttatgcgccaatgatataggatacggcatgtattcttctgtctcattggttgcataaccaaacatcattccttgatctcctgcacctattttttccagctcatcatcactaagtttatttttttttgtttctaaagcctgatttactccaagagcaatatcttctgattgttcatctaatgttattattacattacattcatcacaatcaaaaccatattctttattattatatccaatctctcttattgtatctctgacaatcttatcaatatttatatttgcatttgctgttatttctcccataaccaaaacaagatttgttgtaatcgctacctcgcatgcaacatggcaatttggatcttcttctattaatttgtctaatattgcatcagaaatttgatcacaaattttatctggatgtccctctgttactgattctgatgtaaatagatgtttattcattatatatttctcctgtactaattcgtatttttctattatatataaatatagtggtttctattatccaaattctgtatctataattttcattgatattttttgtagaaccttacaagaaaacttgatagtgttttgaataccttcttcaatagaaacttctggtttccaaccatacttttcaaaagcgtaatcattagaaagttcagtatactttgttacttcatgatcaagtgctttttcagaaataggataagcaccttcatatagattcggatagttgttccaaaaattcttagaatcactatattccggtaataattcttctttatgcataagtttagtaacaatcttcatcagttcatttatggacaatgtcgtacccgtagaaacatttacaatatgaaatcctttatcctgtaacactaattcgcaaagtcggattaaatcttcaacataaacaaaatctctccgttgctcgcccgtcccgtgtaataccggatgtctatcatagaataattcccgaatcatatatcctactaccggtggttgtgttctcaagcaatctaaatgtggtccataaacatttgcaaatcgtagacaggtaacattcatattataaatatccacataactacggcaaaactgttcagctgtatatttagtagatggatatatcagacttggtggcacaacattagtttcaatcgaaggaaaatctgtattattttcatacaccgcagatgtactggcaaatacaacttttttcaccccataaatacgacttgcttcaagaatagttacggttcctgtcacatttacgtccaatgcttctgaagggttcatctgacaatcaggaagcggagtaattgcagcaatatgataaacatagtcgaattgatgtttttcaaaaatttgattgatcaattctctatctcttatatctcctctgataatttcatttctaaaatcatggttggaaaatacgaggttgtcctccgaaccataagaaaaattatcaagcaacgtcacttggtctccttttttccaaaaataatatgcaagctgagaaccaataaaacctgctgctcctgtaataaatattttacgcataagtaaactccttagtttttaatatgatcaataccacacatgctcttataaaaaacactcatcattaaatgattaaaaatcatatgtacatcctccgtgatttgcatactattaataggcacatgaagagaaatgtctgatagttcttttaaccttccacctgaatatccagtcaaaccaacaactttgcaaccttgttttttaccatactctacagcattaatcacattaggagaatttccactaccagagatagccattaaaatgtcccctttttttatttttccttgaagctgaaaacgaaatacttcttcatatccaatgtcattagctactgccattatagtagcaatattgtcatttaagcataaaaagcgaaactttttatctatatgctcggaaactcccttattaaaatcattttgaaaatgagacgccgttgcagcacttcccccatttccaaaaacataaattgtagcctcccttttcatacctgcttctaataaatttaacacttcgttcactgcgctcacatcaattcttttcagaatatcaatttcttgctcaagatatgtctcaattaattcattataatccataatatcctacccccttaatcactaaaaacaattcgacttccctcatggcaataactaaatggtatatatgtaaattcagaaagtgcttcttgtactaaattctgtctctgttgtggtacataaagcatcataaatccgcctccacccgcacctagaatcttaccaccaagtgcacctgcacttttagccttagcatacatactatcaatctgcggattagacacaccgtttgcaaacttctttttaatctcccatgttctatcaagctcggctccccaaaagtctagattgccatcataaagtgcttgaacagcacggtctgtagtatttaccagttcatcaagcataactgttttatctaaaatagtatcagattgctcattaagaatttttctggaatctctagttgttccagtatagaataacatcaaattatttctcagttgaaccattgcttcttttttacagacaacaggtgtaatacttacgctaccatcattaaaaaatttatattgactaaatcctccatgtgcaacagcaaactgatcctgaatcccaatgcgttgtccaagacgattaatttcaatctcgcatgcttcgcgtgctaaaactccttgtgacacaaattcacctttatatgcatgtaatgcatttaaaacaccaactgcaagtgcactggaagatgcaagtcctataccggcattacttaatggaatgtctgccatataaataatttcaattcctttttctatgccaacaatttttagtgcttcccgaataatattatgtttcacttcatccacacgactaactaattcattgccagaataaactatacgaatattatcatcaaactttctgttcacaataatataaacatacatatctaatgctgtgctaacaaccgtaccataacccaccttactgttttcatagtaagtggaaaaatctgtccccccaccaaaaaatgatgctctaaggggtgtctttgaaataatcatgtatcttctcctttttctctaatgaaactatttctttggcaacatccaaaactgtgtatttttcatcaaccatcctacatatacaaccggcagcctctcccgctgcaatatcacgttcatcatccccgataagatagcattcggagaggtttaatgaatattttttctgagcttcaaaaatcatacctggatttggttttctacaaaaacaaccatcgtcccaattatgaggacagtaaaatatatcgtcaatttctgttctttccttcaaaagatctgcacgcattttttcgtgtatgcaatgcaacatttcttctgtgagattacctcgtgcaattcctggttgattcgtaatgataatgacgagaaacccattttttttcagcatatgaattgcttctattgctcccggaagccaaacaaactcttctggcttttctatgtaacaagctcgtgccgggcgtttgtttatggtaccatcacgatcgagaaacacaacacgtttcggtttaaaaaattcttccgtaaatttgattcgctcaaaagaaccaacagagtaatattgatgctcagtcattgtggcaaacaacttgttttgtgcaactaattgtggataaacctcttcctcaaaattacaattttcctctgatattaacgaaatgacgctcttatcgactaacgcataaccaatatcaactccctgtaaatttggtataatacgttttttgtcataagttgtgatcaatccatcatcagtaatatgtagattgctttttgtatagttgtcacgattgctataagcagtaatttgaatctttgctttattattacaaaagtctgcgaacaattttgaatagttaatcggacaatagttatcacaatataaaagtaaaaatttatctgcgatctgtggagcagcatgttttattcgcatacctgtgtcgtagtctactggcgttatatcataatttatggttaatccataacgtgaaccatctccaagatagtccataattttcttaggtaaataccctaaaaggagcaatgcctcttccattccgaaacttttaatctggcgtattagataatcaataaatggaatgttattaatcggatacatcggttttggtgcagtatttgtaaatggtttaagacgtgtgccaagtccaccagcaagaatgacaacttgagtaactcttttgttcatattcactcctcttatttttatccacggccatatcgtagtatattaaagttcctgacagtcattggacatattgatatcaaaaggaatcttattctatcactaatttttactgccgaatttattaaatatatatatctcgtttttttataaaacaatgaaatatttactacggattctttaaatttttcatcactcataagacatactatattgtaaaaataccataacacatcatacagataccttttttgcaagtctttcacaaattttttatcagagcttaacaaacggcattttcttattccatctaaccagcattcatataaatctttcaaattgccttttatttctgtccccatcaatccatcatctctaatcctgtaatgatataatcccttgtgatatgcaactatctttttacattttaaaaaaatagttggcatcacatataagtcctcatgaagttttccttccggaaacttcacgtcttcaaatatttgttttttaaataattttccccaaacttcaccagccgatatttccaaaatatgtaatatcattttctttccatcaccaatcaatacctctcctgttgaatgctcatttcctgctttaatgataaaagcgatgtccgattcattctcttcttccaaccaaaccaatgtttcaattgtattattttctatccaatcatccccatcaacaaacagtatataatcaccagttgcctcctcaattcctctatttcttgcagcagataccccttcgttttctttatgtactactcttatattttcatattctttttcatacttatgacatatctctggagttttatctgtagatcctccatctattagaataacttcaatatttttatacgtttgattaattagtgatatgatacattcctctacatatttctctgtattatatactgtaacgattactgatactttacacacaaatccactcctcattttcttttttttaatacactccatagtttaaacttcgtcatatctattatcattaatctttatcattcaaacaattaactaacattccctttatctacacctattattccatattactttttctatgcatatttatatccattcctaataagcactaaaatactcaaataataaaaaatagattttgtcttttatgatctcaaacaaaatctatttttcttatatattttcaaaataaatatttaatttttccaaactattttctaattgccagaacaaatctttaattttttttattactatttcgccatacttctgtccttttattaaattatatttcataacaagacttctcaacatctcatttttatgggacatatcatgaaagtcattctggatatttcttatatacgtgttatcagataggtatttatgctcaatcatataatctattctacaatacattatctcattaaatatgtaaatcaaatgaattattctaaaatcaaggcgctcatgtttacatacgcattcattaaaatattctattatatgatttaggcattcaaacccatataaaacagcttcgtgtactgtaaataagtctgactcatcattaattgtattctcacgtgattttataaaatcagtaatcatattacgaattctatcaacatttaaagcatactttttattttttaagtatttaaatgttctaatttcgacagaattcacattatctctttcccttatatatcccgcatgggcatcaaatgccattctaaaatctaaatatgaaatctcttgtattgaataagtatgtttgaaaaagtctgctgtaaagaacacttttttttcattatcatatccccaaataagcatttcatgttcgctatgttctttttcctcaatatccttccaccacgaatctataaaatacatatctactgccaaaaaaatatattcttgattatctatactattcttaataatatcattaacatcttgattctttcttacatctagaattactgtttccaacactggacattgctcataataattaatatccctgtcatacttaaaatccaccatatactcttttctttgtctccttgcatatatccataacgaaatataattattatataaccatacttcgtcatttccataagcttctaatattccgtttattgcagtatttattgaatatgtcttatatttaggaatcttaaatggtagcttaattatattattatttttgccttccatatctttattttcctctcttatgaacagttattcactaatcacttataatgctttgcctgtgtactatacatattatagtataatccgtccgcatttttcattaactcctcatgacttccttcctccgtaattgttccattattaaatacaattattctgtcacaaaatctacatgaagataatctgtgtgaaatatatattgcagtttttccataaaccaatttgtcaaagtttttataaacctcatattcagaaattggatcaagagctgctgttggttcgtccattactacaatcggagcatttttatacaatgctctggcaatagcaagtttttgaccttcaccaccggatggctcaataccgttttccacaaacatcttatagatatatgtctggtcttttttatcaagactatcaatccatttatcaatgcctacaatcttatatatttcttccagatccgtatttttatcatcaaatacagttacattttctttaattgtaaaagcaaaaagtctaaaatcctggaatacaactgataacatcttcatatattctacaatgttatactctctggcatctttaccgtttactaatatctcaccttcgtagttgtcgtacaaatgacaaaggagtttaataaatgtagtcttacctgcgccattttgacctacaattgccagatgttcccctgctttaatctttacagataggtctttaagaatatacttgtctgtgtttgggtatttaaaactaacatccctaaactcaatttcgcaggctttgtcagttacctctacaacacaatcacttaaatccatcaatctgtcgttttccccatatatatcttcaacaaaatcgatgtaatactttaatatcgatgaagtataattcatttccaaatatgaatttacaattcctctaatagcaccaccaaatttagaagtcgcctggaacaaactggagaattcaccaattgaaatgatcttgttaaaaacatttactgataataatatatagatagcagaatcacaaacagcataaaatacattatttatatcccagtattttataaattttgtatgatactttttgctggtattatatattctacctacatatccgtcatatttcttttcgaatatttcagatgtatcatataaacgtacatctttggcatatctgctttcctgtagttcagtgttaaaatatgtactacctctctctacattgcccatttctttaaaaaacttacgcctgctcttattaacttttgaagtagtatatgaattcgctgcaaacgaaataattaccggaatcattaaccaaggaattcttgtacaaaccaaagtcacaacacctaaggcaacaataaaattcgtcacaatgcttgctaaagatgtgataagaccatttacctgcccggtttcatttaaagctctttctgcatttttaactttatccaaaaattccgtttcttcagtatgtttaaatttcatattgatacagctcatacataaatttgttttaaaaattcgatcaaacttttcaccaattctggcaatgttttctccaacccatttcattatgttggagcaaatgaaattacctccacaaataaatgctacccagaataccacccaaccgatatttctcttagatgcatcagcaatttcatcaattaaatactgagagcccaaaattgatataaacggagaaactgagttaacgattatatttattaacaaaagcaaataatattttttatcattctgccaagcaaatttcccgaagaacttaaaacaacgaatattatctttactatttttcatcgttctgtcctcccacactgtctttcttatcctcataatattgggactgaatctgga

SEQ ID NO: 61 - DNA, 31696 bp, unidentified
  source 1..31696: mol_type = unassigned DNA
  misc_difference 4452: note = a, c, g, or t
  misc_difference 4453: note = a, c, g, or t
  misc_difference 4454: note = a, c, g, or t
  misc_difference 4455: note = a, c, g, or t
  misc_difference 4456: note = a, c, g, or t
  misc_difference 4457: note = a, c, g, or t
  misc_difference 4458: note = a, c, g, or t
  misc_difference 4459: note = a, c, g, or t
  misc_difference 4460: note = a, c, g, or t
  misc_difference 4461: note = a, c, g, or t
  misc_difference 11010: note = a, c, g, or t
  misc_difference 11011: note = a, c, g, or t
  misc_difference 11012: note = a, c, g, or t
  misc_difference 11013: note = a, c, g, or t
  misc_difference 11014: note = a, c, g, or t
  misc_difference 11015: note = a, c, g, or t
  misc_difference 11016: note = a, c, g, or t
  misc_difference 11017: note = a, c, g, or t
  misc_difference 11018: note = a, c, g, or t
  misc_difference 11019: note = a, c, g, or t
  misc_difference 16899: note = a, c, g, or t
  misc_difference 16900: note = a, c, g, or t
  misc_difference 16901: note = a, c, g, or t
  misc_difference 16902: note = a, c, g, or t
  misc_difference 16903: note = a, c, g, or t
  misc_difference 16904: note = a, c, g, or t
  misc_difference 16905: note = a, c, g, or t
  misc_difference 16906: note = a, c, g, or t
  misc_difference 16907: note = a, c, g, or t
  misc_difference 16908: note = a, c, g, or t
atggctgctgcacaatattacacttgttataataatgaggtcgttatgcttaataatttaaaaaaaattcgtgaatcaaaaggtatgtcacaagagtttgttgcgaaagctcttaacgtgtcaagacaatccgtttctaaatgggaaaataataaagcttttccagacatagaaaatattaagcttttatcgcaactttatcaaatctctatagatgaaatacttgataataacataccatctgataaaaatattaggacagttgactttgattcccacatgcatgagaaaaatatttatcgtgctgtctacttattaacaattgtactcattacttctagctttatttcagtaataggattcttgagcgctattgttattttattaaaaacatggagaaagaaatatccatactatttttatgtcttatgcatcatctgcttagtcatcaatataataaacatggggatcttttttaatagtttattgtttcatattggtattacagtgattcaataggaaggatgtcatattaccgcaacttgtaaactattgtttactacttttgtttttacccctgttgaatggctcaatcccatatacttgtatataaaactcatagttgcttgtttgcttgagttcctttttagcacacagttatatatgtttcctttataacaagtatatgatggagaatttacagaagagatgttgttatccttaatcacaacattatattctgctttccatgcaaaaatagattcataggcaatatgataagacctatttttcaatgatcaagaaactgtaagtagaattacaatcaatctttggtgagtttttttcataaatatagtcctccacaaaatttttgacaggtatgaattttgacacatacaaactgatttggaaagcaactagcactttacattatgtatatagtgcttaacatattgaaaaattctcctgatgcattgcatataggaaaagaaaatatttcgtcatcgtaaagatttatcagaattttggagttatactggaaaagtgcaaattccggtcgatcggggcatccataccagaactagtggggcctcccggccatcctgctcctcccgttcctgtgggggatgaacagggtcacgtacgcacaggccgccgcggatctgctgacaacagctgtgaccgtgttttcgcggtgcagatccaccgccagttaaagcagcccgtcgcctgacggactgctgcaacctgcggattgccctaacttccaagctcccactgctccgctttctttctcacatccacaaacctgcggtaaatcccttcttccttcaggagttcttcatgggttcccctctgcgcgatcgttccgtcctccaccaccagaatctggtcagcatgctcaatggttgccaggcggtgggcgatggtgatgaccgtcctgccctttgtcagttctgtgagcgcttcctgaatcagatgttcgttctccggatcgatactcgccgtggcttcatcgaggatgatgaccggcgcatcctttaagatcgcccgggcaatggaaatcctctgcttttccccgccggacagcgtaccgccgccttcgccgatcaccgtgtcatatccgttgggcagtgccatgataaagtcatggcagcgtgcagcctttgccgcgtttatgatttcctccccggtggcatccggctttccgaaacggatgttgttccttatcgtatcgtggaagagatagacattctggaataccatggagatattcgcaagcaggctgtcgcaggtaaactctcgtacatcatgccctcccatgcgcacactcccgccctgtacatcatagaaacgggcgatcagactgcagatggtggtctttccgctgccggaaggcccgacgatggctgttgtggtatgttccgggatgcaaaagcttacatttttcaggaccttgcgcctattattttctccatagctgaaatcaacatttttaaattcaatgtcataatgacacagttcgatcttctttccgtcccggtcaatataatttccttccttcagggcttcaagctgatccatggtcgtatcgatcacaccgagtacatgggcgctgtcgctgatgggctccagcccggacaggatgctgaaagagaagaacacaaacatcagcatataggagaaaggcatttcccccgtcattcccagatagaacgccgcacccgccataaatacagacgccgtcttgatcgccagcagatgcaggcagttcgccggggtatatccccactcaatcttcaggcagatatcacggctgtcgctgcatgccttttttacagccgccatggacgcaccgccctggccgaaagatttgaccaccggaagtcctctggcgtactcaaggattgccgcggtaagatccttccccgcctgtgccgataccggagcgttcttcacactgtgccgggagaccagaagcaggaacaggaaggaaatggctgctcctgccagtgcaattaggcagacagccgggctgaaaaagagcaggaaaaggaaaatgcataggaagtttaagtaccctcccacaaaagtatccaccatccgcatccccatattttccagagaatgaagccctgtcgtaatagagtttagaatgttcccggtatctacctgccggaaatagcccagagatacccgcttcagggcgtcgccgatggcaagccggtctctggcaaccagctcatagctgatcccttcctgaaatctggcgcgcagatagtcaaaaagaaaccgcagcagcacaaggcagaggatgataccggtgctcagccagatccagttcttgtcaaatccagtccctttcctctcactctcgatcagcataccgacggtataagccgctgccatggtcggcattgccgcaaaccatgtggagaggaaggaaaagaaaaatcccatataaagcctgcttttaaactccccgcaccagttgatgatccgctttactgtccggaacatatcaggtcacctcctttttctctccgcattttgtgcgcctcatcggaaaccgcccatccttttgcaccgatatgggctttccacatctcacagtacagagggcaggtcaaaaggagctgctcctgcgttccctgtgcgatgatcctgccattatccaatactgcgatacgatccgctccccggatcgtggagagacggtgggcgatcacaagcagtgtcttccccctcgtcagctctgtgatactcttctggagcttatcttcattttccgggtctgtaaaagccgtagcctcgtcaaggataacgatcggcgcgttcttgagcatcatcctggcgatggcgacccgctgcttctccccgccggaaagccgcttcccggcctcccctgccggcgtgtcgtacccattaggcagtttccggatgaattcatcgcactgtgccgcttttgccgcggcaaagacttcctcatcacttgccgcagggttcccgatgcggatattttctttcagggaacaacggaagagaaagttatcctgtgtgacaaaactgaccatcccggacagctccgacagggagtattctttgaggctctttcctccaagaaggatctccccgctgtccggatcccagaacctcgcgatcaagcgtgctacagtggacttaccgccgccggacggccctaccagcgctgtgaagctgccgggtgagagttttaagttaatgccgtggagcacctcctctttgcctttcccataagaaaatcttacattcctaagttctataccataagccgcggcagaagcctgtgaaaaagccgggcttttggtctcttcttccgctgctccttgcggttccggcagttcttcaagctccagatacgcctgcagctcttccaccgtcatctgtatttccttgatactgttggagaacacttccagctttgccagggatgtgaccatggacatggacaacatcacgcacagagccgcctgccctgcgctgacagatcctgacacagccaaaaacaggctcacggggagcgtccccagcagagtggacggaaacagtgcgaaagccagcttgaacgtcacccatgtggagcttagccatttcagcacgaatgtcttataatccatgatcgcgccggcaaatttctcataggaagttccggcacgtccgaaggccttgatgacctcgatcccctccacatactccacgatcgtgctgctcatccgggcatttgcctgattgtatttgtcgaagttttgcccactgatccgaaaagtcagtatcatgcagaccagagaaagcgggaccgtgaccagagatgccagagccactctgggatcgatcagcgccagtgcaatcaagcttaaaaccggaagagcgatgtgccctgccccttccgggatcatatgcgccagcggcggnnnnnnnnnnttcgatcttatccaccatcacattcttgatctccccgatggtatgcgccgttacttcacccagcggcgcgcgcaggaaacggtctgccacctgcagcctcagcttctcaagaatatggtacgccgcatagtgtgacagcccggttgaaagcccgaaaaatactacttttacaatgtaggatatcagcgccagtgagcaccagaaaacaatgacatgtactgtgactgtttccgaaataaacctttcaatcacccggtacatacagaaatagggcaaaagccccgctaagacgctgataacagataaacaagtggaacagaatagttttccccggttccctgcggcataatcgagcaggcaggagaaccagccctgtttcttctcatccatatcgtacactcctttccgtcagaggcggttttcctgcgtatagcagtttatagcctttgacgttcttagtgtacaatctttcgttggatacgtccgctccggtcagaccggactgctccatttggttcagaaaattttccgatactgcgcaggagacatccccattgccttccgaaatgcagcagaaaacttactgggactgtcataccccaccatcccggcgatctgtgccacgctgtagtccttttccgttttcaaaagcacggcggcgcggttcatccggtactgcgcaagccacattccgatggcggtcccgtatatggagcgaaagcattttttcaatgtggtcagtgagatcccgaaacgttccgccagttcctcctgggtatagctttctgctggatgttcttccagaaattttctgacagctttcgttttctccacatgggctttataaaaatacggtttctccccgatggattccggtagttccagagcatccagatacagcagaagttccatgatcttcactttaaaatagggaagcctgatcttctgcggcaccgcgtagagctcgctgaaaatatgttcaatggcgtccattccatggatgacaagagggtacttatcccggcagtatttctcctgcaatgcatatacatctaccggaaaatcccggatctcctgcggcagcgcgcggctggccgctgcaaggtcaaaggagatcatcgcgccatggtaatgggaaaggggaagcacaaaacgccctgtgtgggtaagccggcggtccagtttgagatcccccgcctccacataggagtatgcgtcactctttgccgcatactcaagcctcccctcacggcagtggtcaatacacaggatctctctgcccggatggaagtcagaatcataatactgcatatggaaatcattgtaagccagcgtgacaccggggaacacgtcatagatggtcatcctgccctccccggtctcgttacggaattcatatacactgcacccgctttttttcgtcaaaagggcggcatcatcacagtggctgaaaacatctgtcatgggtgtttcctcctttgacattcagcatagccttcctttggttagttgtcaataactgtactgggcaaagaataatcaaccctccggattgattttgtttattgtccatgcacagctatgctgctgtaattctacaaggtggcgatataatccatcttcctctatgagttcagaaggcgcgccctgctggacaacttttccctgttccagaacaaccaccttgtccgcaccggcaaccgtacgcatacgatgagcaactacaaggactgtctttccttttgtgagccgggtgatcgccttttgcacagaggtttcattttctgcatcaagggacgctgtggcctcatcaagaaggataacaggtgcatcttttagcaaagcccttgcaatcgagattcgctggcgttcaccgccagacagagtagaaccgttttctccgattactgtctgatatccctgtgggaaacgggatatgaattcatcgcagcatgcggcctttgaggctgcaatgacttcctcatcggtggcgcttcttcggccaatgcggatattctccatgatcgtatctccgaacaggactacatcctgaaagacaatcgagtaattggaaagcagcgtttccggatcaaccgtccggatattaatattgccaagtctgatctctccacttgctgcatcccaaaagcgggccgccagctttatggctgtacttttaccgcttccggacggaccgactaaggctgttacttctccctgttttgccgtaaaacttacattcttcaaaacagtttctccgcccttgtaggaaaaagaaacatggtcaaaagtgatgtcacatccgctatttgcacagctgtccgctccagataactctggctggttttccatttcttttatgcgtttgatctgcagattagcgttgaagatttcagataactgcatcattacgccgcttagtggttcatatacccttgatgccgccagcaggaaaagtaaataagtaaacaaatctgtatcgccgccaatcagcaatgtagttcccactaaaacaaccagggggaggccaagcctcaaaagcatttgagcggaagtcagcagcgtaccggaggtaagttctgccttggcggacgcattgaccacatcttgtaatttcctttcaagttcttttaaatatttatctgtttgattacaggttttaaggtctgcaatattgtccagaaattcctggataccatcggcggcagaaagcctcgcctccatccgtctggttcccattctgtcctgcagcttcttgctgcccactatcagcagtaaggctgcgggggcaacactaaaaagcgccagtgccatgcgccagtccatagcaaataacccgatcataatgaaaatgatgctgatgacggaaccgatcatctttggtatggcgccggaaaaagtacgttccaactcgttacagtcactcatcatggaggtagtcatttccgcaagatcatgttctccaaaataggccagagggagtttccgaagcttctctgccagagtaatacgccgtgcagcactttcttcatatgccgcaatgtaggtacagcggtattcaataaaattcgcaatgaaaatgacagttacgctggccagtgcaagaattgtatagagccaaatatcaagagttccagccgtttctcctaaaagaggcttacacacttcttgcaaaagcatgaggcacagtgccatcgggacaaacaagctcaaacttgaaaatgcagaggcgataccgcccttttttaaatctgccgcacctttatcgctaagggcaaacaaacgtttaagcatgaaccatcgcctcctttcctctgcttgccgcactggctgcggcatctggggacacccttgcggcatttcctaaattccatgcagcagagcgctgatactcccgccacatgtttgcataaatgccatccatcttcagcagttcttcgtgcgttcctgtttcaacgatttttccgtcagccatgacaaaaataaaatccgcattttgcactgtagtcagccggtgggcgatcatcagaaccgttttgccgcacagtaaatgctcaaaggccttttggatctggtactcattctcggcatccgcaaaggaagttgcctcgtctaaaatgatgatcggcgcatttttcaaaatagcccttgccaaagccagccgctggacttctccaccggaaagatagatcccttctgttccaatgaccgtatgaatgccttgtggaaatttatgaatgatatcatcgcatctggcctgatgcagtgctgccaggacctcatcctccgtcgcagcagggcaggacattcggacattttccaaaatgctggtcttaaacagttttgttgtttggagtacaaatgctgtcttctccgaaagggcttcatctgtaatatcccggacatctacgccgcctattttaatactgcctttatccacgtcataaaaccgtgggatcaggcttgcagctgtcgttttcccagatccggacgcacctacaagcgcataagtctttccggacggaagctcaaatgacaggtctcttaacgccggcgccggcgcccccggataggtaaaagtaacatgggaaaaagtgacggtattcccatccggcactgacggatgctttgttttaaccagcggtttttcttctaaaagtgtatcgatcctcctgaccgcttcctccgctgtaattttgtaagaggaaacgtacatgattttattgatcattcctgcacaagccggtgtgaacaggatataaaacagccagttgatcagaaatccccgataatccgcggttccggaaaggaacagcaggccaaaagggatcaaaagcaggaatgaagcattgaccagcgtataaaaaatactcataggccactggcagacaagagcaaaggccgtgatattttccttgtagctcagaatggaacggtaaaaacttttgaaagaataaatggtctgctgaaatacttttacaacaggaattcccctcacatactcaacagcttcgcggttcatggtctctccggcatcctgtacctgtttgatgtatttcggggcggtagttcccatgacagttccctgtacggcaaagcccagtgccagggggatgaggctgagcagccccaggcgccagtcaaagataaacaggaaagaaaaaataataaacggtgtgacaaacgcaccggctaaatccggtaactgatgtgcgataaatgtctctgtggaatcagcgttttcatcaatcactttgcggattttaccgcttccctgcataccgaaaaacccaagcggcaatgttgtcaaatgttttaaaacagccattttcatgttctttgcaatacaaaaagccgccaaatgagagcaaagcagcgagacgaagtagagcaaaaacccacctgccgcaaacgccacggcaaaccatgcataccgcagcaatgcagatgtggaaacctggccaagatcaggcagaaccataaatatttctctcgccgcgaaccagagccagatgaatgggcaaagtgaaaaaaacgtactgacagcagaaagcgcgcaggaaagaacaactaagtatttcctgttccctgcaaactgcaacaggcgcgatattccacttgcctgctttttttgtgtcatagctggacacccctttccaaatgtgatttgcatttttactataattatgttatcttttaagttagaaatagctaacttgtgtttacgatagcgtttatttttactctggtcaatgcaatcgacgatctttgtgccggcagccgaaaaggttgtgccagaagccgaaaaagaggtgtttcttgtgggaaatatattagatcagctatttgaacctcagtttaaacagatatctttataccctgcttcgggcagcgatcagctcaaaggaagtggcatcacttatcgccctgcgccggatgtgggggacggatactattgggtgcatcctatccgtgacttgtgtgtagtggctatagcagacctgacttttaagaaagagacagagttaaattatgaccacccctctttcctcacaataggaaattatgcatctccgctggtaccatattttcaggggaatacatctgacgtttactatgtccgatgtacgcggacagaagaccatctggcaggatatgtcaataatgcgtcaagatttcgggcaggtatatcatgtggggaaaccatacgtctggtctctgtcacaatgctgccggattactttcgctccttcctgcaaaaaaatttttcggtagaccagcagtcattgatccattccattgaggggctggcaggcagaacatctatgccggaactggagtatctgttcacacagatctgccgggctgaaccgactgtccagaatggaagcctttattttgagagtaaagtgctggaactgatttccttgctgcagatgcaacaagaacatcaaaaagcatttccagaagtgtcagcattggatgaagctacggttgccatggtacgccgtttagcagtttttttggagagccactgtgaccaacatcttacacttgagacattaggaaaaatattttataccaataaaaataagctttcctacctctttcgtctggtctataacgaaagcattcctgcatatattcagaaaatgcgtttagagaaggcacaaaagcaattggagcatccggggatcagtatttatgaaattgccagttctgtggggttcaaaaatcaggggagtttttcagagtggtttaaaaaagaaaccggccttacaccatccgaataccgctccggcgcgggatctggactggtctgaccatatccgggtaaccagcaagggatatatgctcggttatcatgatatgaggagcgacggcatccgtttcccgcaccggtttctggcaaagatcggcgacaaatggatgaagatggctgtacacaagatggactttggcgaataaggcttttttactttaattcccgggatgcgttccacattgccgcgtattttccgccctccccgatcagctcgtcatgggtannnnnnnnnnccgccgtccagcacgaggatccggtccgcgctgcgtatgatggggagtgtatgagcgatcatgaccaccgtcttatccgcgcttagaaggcgcgccaccgcctgcttgacaagaagctcattctcgatatcaagggaggctgttgcttcatcaagcaggagcaggggactgtttttcaggatggcccgcgccacagaaagacgctgtctctcgccgcctgaaagccgattcccgttctccccgaccatcgtgtcatatccgtgttccatctttcttataaaagtatcacagttcgccagccggcacgcttcttcaatctccgcatccgtggcgccgcgccttgcatatcggatattctcccgcacggtatcattgaacaaaaatacatcctgatccacaaggctgatccgggagagcacctgctccgccggatatccggcaatgtcctgtccgccgatggtgatctgcccgccctggggcgtataatacttgcagatcaggttcaggatggtagacttgcccgcgccggaatcgccgaccacggcggtcaggcttcgctccggtatggtaaaggaggcgtgtgtcagcacaggttctccctccttgtaagagaaatccacgtcctgaaaccggatctcggttcctgcagccgtcagatttcgtctggctgaagcgtgtacgatatctgtccgcgtctcttcctctgtcttctcctcttcctctgcgaagatcccgctgatcttcaccttcgacaggaggagattccggtatgctgtcagatcgataaaaagcgtcatattcaccttgcctgcaaacaggggcagcatgatgagcaggatgagcgctgccggctccagcgcgccggaaagccacgcccgcacagacaggacgatggcaagcgccagggcgatatagcttaaatagttgaacccaaagccgatagggagcactgctttttcataatcatagctgatattggaataagatttcatcgcctctgtcactgccctgtttttcgtccccaccagcccgtaggagcgcagtgtctggctcccggtcagatactccgtgatcgcgctgacattctcctccctcgcctggttcttcctcgtaccgtatttctgtacctgacggatggacagcgccatggcagggatgacaaacagcgtggacgccagcataatcagtccgatcggcacatacagagtacagccatagagtccgatcatcagcagaaggatgctgtatttggtgatgtccgccaccttatgggtgaggatctgttcataatccgctacctcactggtcgccgcattgatgtagaatccggtgcggtttttggtaaagagcgacaaggggatgcgtttcagcttatcgcccagggcgatgcgcacccggcggctcacatcagagcccccgatctggctgcctgtataggacgtagtatagagcgccagacgcaggacaaagatcagcgtgagcatcccggtggctgtcaggatatccccgaagtccactgtctgcccgaagatcaggtcaagcacccggaataatacgagaaagctgcatccactcagaagcccctcagccactacccctgccacagacaactttagttttctgcccatactgaaaatatctgttcccgatttcatgccaaagcgcctcctttctctgcctgccgcaccgtctgccgtgctgtttctccggcctttccatccctgcttttcagttcataccggatatttcttgccgcatgataatcctcccatgcttttctgaaatacacactattctcaatcatatcttcaaaacttcctgttctgctgatcccctggtcttccaccacggcgatgcggtcgcagttctttacgatacccagccggtgggcgacgataatgactgtcttgccccggcacaggttttcaatggcacggtcgatctccagctggttctccggatccgccgcgctggtcgcctcatcgagaatgaggatgggcgcgtttttcaggattgcccgggcaatacagatcctctgcttctgccctccggagaaacgggtcccatagctccccactttcgtctcatatccgtccggcaaggacataatgaactggtcgatctgcgcctcccttgcggcggcacgcactctctcaagggtggcggtccggtcgcccatagcgatattctcatacacgctgcctctggtaaggaagctctgctggaagacaacggatatattttttaataattcctcatagtcaatatccctcacatccactccgccgatcaggaccgcgccgtctgttacgtcgtagaaccgggaaataagctgcacaagggtggtctttcccgcaccggattcccccacaaacgccatacgttccccatgggcgatatggatgctgcagttttgcagcaccggattcccgtccgcataggcaaaggatacttctcgcacttcaatatcctgcttctccgggaacgccctgcctcctccgaacaccggcgtatccaggatctccttcacctgccccactccgtttagcacataggagaaattcgacgccagctcctgaagcggacggatgtcagtcaggtactgggttcctacaaatgcgaacaaaaggaatacgcccgcggtcacttggccatgcacatacatccatccgccgagaggcacaaggaacaggatgccgcattccaaaagcaccacatacgcggcatacagtggtcccgttgcccgggagatctctccccacatccggtgctgttcctccacagcctgggaatatttccggaacgaccgggatcccatctgaaacgccttgatcagccgcatgccattcacatattcatggatggaggaggaaagattcccactggctgtgtttacctgcggcatgaatttagaaaaccgcgtaaacatcacgatcatcacgatcacgacaatgacaagggggatcatgctgaccaatgccagcggcacgttcacagacagcagatacaggaacataaccaccgggccggacaggtacagcaccagttccggcagattgtgcgccagaaacagctccagcttctcgatgctctcattcatcacatatttgatctccccggtgttcctttcattcaatgctcccagaggcatctttgccatatgctccgtcaccatgcaccgcaccttgaacagcgtgttgtaagcgccccggtgggaagacagcgtcgctgccagcgcgaaaagacatctaagcgccattgatacaagcaggatcgctgcccacttcagggcataggacaggtcacagcctgcgcccgcaaccgcgtcgatgatcttgtaaaaggcaaagtaggggatgaccgaccccagacttgccagcagggagagccccacagaagcatagatataccacctgtcgcgtcccgcccattccatcagcagggaaaatccctttttctcagatttcaaaatatcttctcctttctgctataaaagtgttacagtgtgaatcctaaccaagagttcagttgtgttagcctcaacttactaaaaggattgtaaatcgtaatctgccctgttacaatagacacagagaagatacgtctgatacgcatgaaaaaacgtccgatacgcacagcggatcatttcagaaacaaaaatgggggatatttatgaaggctgctgatgattacagaaaattatttgaagaaatgcactttacgccctgcccggctccggatggatttccgaggatgggggaatgctggcgcttaaactctgcaggcggcgggggctattactggctctatgacgcaggcgggcgctatatcataaagatccatgatttctggttccgggaggataccatattagatatgcgtttccccgaagcgctgagtgttacatggtatgaatccatttccggtgaggaaatgatgccctaccggagcctgaactcccatgtggtcaaaagcttcctcggcggatacgagccgttccgcgcactgatccaccgcaacgtccccatccgctccatcggcatcgagtaccgcccttcctactatgatgcctatctgcgggaaaccttcgggccatcctatcagaatgccgcggaggcattccgcagtattgatgagacacgggatttcccgcagatggcggagcttctgaaacagctctggcactatcaggggcaggggcttcccgccaccttgtactacgatgccaaggcggcgtaagtcctctcccttgtatttgagcggcacaggaaccttaacaaaaagaaggcggcgccgctgccggaaacagaccgggcagtccttgacagccttgctgcctatatcggggatcactatgcggacgaccttaccattgaaaagctctcccgcatcgcctgcatggggaccaccaagctgaagcggtgctttaagatttattttgagtgcacggtcaccgaatatatccagcaagtgcgtattgatcaggcagagcacctgcttgcctatacagacctccctgtaaaagatgtggcagaagctgtgggatactctgccgccgggcgttttgccgagctgttctgccggataaaaggaacgcttcccgccgaataccgaaggattgcgaaaagccggacagcggtttgagattgctcttcaaaccgctgtctcctcaatttacagcgaccagcccactgcctcgctcctctgttgccagaaccttcggtaaattccctcttcacccagaagttccccatgttttcccttctgcacgatcttgccctgatcgatgaccacgatctggtctgcttcccgcacggtagtgagccggtgggcgatagtgatcaatgtcttgccctctgtcagctcccggatcgcgcccatgagcgcctgctcgttctctgggtccacgctgctggtggcctcatcgaggatgatgaccggcgcgtcctttaagatcgcccgcgcgatggagatgcgctgcttttccccgccggacagggtggaaccgccctctccgatgaccgtgtcatagccgtcggggaattccatgataaactcatggcatctggcgcgcttcgccgccttgatgatctgctcccgcgtggcggcggggttgccgaagcggatgttattctcgatggtatcatggaagagatagacattctggaataccatggagatatttctgagcaggctgtcggccgtgtagccctttacatcctgccctccgatgagcacctgcccttcctgcacatcccagaaacgggcgatcaggttgcacagtgtcgtcttgcccgagccggagggcccgaccacggcgcatgtcgtgccctgtgggatggtgacagacacatgctcgatgaccttccgcgccccgtcataggaaaaggaaatgtcccgcagctcaatgtcaaatctctctgcctccagttctctgtcagaccggtccatgccggggatattggtgactgcctccagacggtccagctctgtggtgattttcttggataagaaagcgccgtcccccattgtctccatctctgaataaatgataaatgcagccacaaggaacataaagcagtaggacagggagatcgtcccctgtaaatagagcgccgccgcaaggaacaaaagcccgcagccggtcagcttatacaccagggtatacagtctcagcagaggcagggacgccttttcctgatccagtgccgcctgctgtctctcccggaacgcttcgtacaccgcgccgtccctgccctcattgcggcagaaggcacgcatgaccgcgattccccggatatattccagagactgggtgaccagatgctcctgggcttcctgcactttcacggtgtgggtcgcggcggcatggatcaggcnnnnnnnnnnggttcatgaccagaagccctgccagaagccccacaagggacagcagcgacatcaacgggctgtaaaacgccatgcacacgatgatgatcaccgccatggagatgccccctgtcatgtctgtgataaagagcatggaatactgctccagttccacgaccgtggaggtcagcgttgtctggatcgtgccaaggcgctgctcggaaaaatagcccatgggcgcgctcttcatcttctccccgatagcaagccggtagtcgcggaacatatcgaagcctttggcgctcatggagatatcgccgagccactggaagaggaaacgccccgcgatgctcccgatcaggatatacagtgcctgcaggatcacgcccctgctcaggtgctccagattctccaccaccacgaacactgccagaagcatgactgccatggacatggatttcaggaaattgcataaaatacccagatagatgcggggcttttccttccccgcgatcgccaggatccgccgtatggtctttatcatctcacttcgcctccttttcgtccgccctgtcagcggcgctgatgtgctgttcccacatggtcttataaagcgggcaccgtttcagaagttcctcctgcgtcccggcgtcaataagcctcccgtggtcgattaccaggatctggtcggcgtttcgtatggtggagaggcggtgggcgacaacgatcagcgtcttcccttttaccagacgccccagcgcctgctggatctgcgcctcactctccgggtccgcgtacgccgttgcctcgtccaggatgacgaccgacgccggctttagcatggcgcgtgcgatcgtgatgcgctggcgctcccctccggagagccggtcgcccgcgtcccccgccaatgtgtcgtacccttccggcagagacgagataaagccgtggcagttggctgcttttgccgcttcctccacctcccggtcggacgccttcggattgcccatgcggatattctcacggatagacatgtcaaacaggaaattatcctgtgccacatagctgatctcgctcatcagctggtcaaaaggaatcttacggatagggacgccgccgaaagaaacacatccgctggtggcatcccagaaccctgccatcagcttggcgatggtagattttccggaaccagacgggcccacgatagccgtcattttccccggcccggcagtaaaggtcacatcatggaggacttcggatttcccgtcataggtaaatcccacgtggtcgaattcaaaggcgcgatctctcagttctgccggctctgccggcctctcctgctccggcgtggctaaaaattcctcgatcgggcttaaattcgctgccatgtaagtaagctgctccagcccaaatccgaacttgatcagccctgcgatgaaaccgatggggatgatgatgcaggcgaggaagataggaagctcgatgctgtccttcatatacagccatgccccgatgggcagcgtccccagcagggtggacggcagcactgccttgaatcctgccatccagaaccagctctgtctccaccagtccaacgtgctgtcatggaagaagttcacagattcggcgaaatgtccgaagctcttgtttccctgtccaaatgccttgatgacctggatgccgcccacatactccacaagcgccgcgttcatctcatttccggcgcgcaggtacgtctccatcttctcgctgtagccccgcatcatccccaccatgaagacgaggctcagcggcactgtgacaaaggacgcaagccccatgcgccagtccatgacgaagacaagcgcgatggcaaggaggggcgccgacagattggaggggaactccggcaccatgtgcgcgatgatgtcctccagcctccctacattgtccaccataagcgtcttaaaagtccccgacggcgtctccagcatcacgcccatgggtacccgcgccatcttatccgcgatggcgcagcggatatttttcaggatcgtaaatgagatcccatggctgcgcatggacgacagcccggtcagaagcgcccgcaggcacatgcacaccgccgcggtacccgcgatcagggctgctttttgtacggtcgctgtcccctcatacagctgcttcgccagcagcgccaccgcaaaatagggcgccatgccgacgatctccccgataacggcgaggatcaccgacagggtcatcctcccctttgcctcacccgcaaaagaaaacaatgtcttcagcggattcgatttcttttccttcatacaaaacctcctcatgccttgctcagtgaaatcaggatgccaatctgttctcttatcttacagaaacctttttgaggatcacgctttagattagttttaactaacttttctatgtaaaaaatgggactgcttacagtcccagaatatttctccagcccggaacaaagaactggtgcagggtatccagatagtggatcgcctcttcttttgtaaaatcgtggatcaccacctcaaagagcgcgttcgtataggcggtcatcaaaaggtgaagttccttcgcatcgatctccttgaccggcacgccccgcttcttcgccgcttccagatacgcaagcgtttctttctgctccagcatcaccatatcgtgcaggaaccaggcgtatttcgtgcctgccgagcagcacaaaagcagcttgaactcctcgaagtgctcatagactaagtctaccatcagccgcagttcattgcctgccgcccacatgccgtccagattctcctgatccagatagtcatagtcaatctgctttgtcgcggaataccattgctccagctcctccagtaccggatctaccagtgcgcagaacatggcttccttgtctgcgaaatgccggtagagccctgccgccgtgagccctgcctcgctggcaatgtcccgcatgctcgctttctcaaatcccttctccagaaaaatcttccgggcaacgggaaggatccgttcatgagtttctgtcttgccttttgacatcttactgtctccttatgtaaacgatgttagctaacactgtttacagtatagcatgagatgaaaaaggtgtcaatggcctgaaaaaagcagtcggccgctacactttcaatcatgtagcttcagctcaactgctttataaatggcataaagttatctcctatttatacccttttccctgtttaaataccggcggccaagccttcatgaccggcgctcccggtttcaaattaaagtcgcagtaatccccatcctccgcgcaggtgtgttcccggtagagtgggacgcccaacgcgccgaacatcgcataatccagattacacagatacggcatataggcgtcatatccgtgtttcttcgcgaaatcagccagcgggcataccagattgtgatagctgaacacatatcccacctctggcgggtctaaggtctttgtctcaaaactccccggatactttctggcattttccgcgttcgtcttatccttctttttatacattatccgcagaagtctgccgtttgagaacactttgcccgcgatctttctggcaatccccggcatggaacggaatttctgttcatagcagatgaccatcaggcgtcctgcctcctccagcgataccccgtatcttttcaggacttcccccattgcaacaaacatatatgccccagtcaggtttcctgtaccgctgactttgtcccctccgatatagggaaaatgctccagaagctccttttcgtagcaatcccagatttcctgcagaagctggccataggatttgcccgcagctttttctaactctttatcgattagtttcaggtaaccgtccatggtcttcttcagctttgggatggattttctgtaatattcatgcattgcataccactccttacttcctgaggatatcaatatcctgcatgccggagcacaaaagctccgtgcgcttctcgcagtctgcaaagcccgccctttttgccgcctctgccacctcgtcttttctgaccgccatgtccatgccctggaaataatagggcagataccccatcatcatatcccatggaccggtgagatccttttcaatcccttcgctgatcgccagaagaacgccgccggggttcagggcatcatagcactttttcaggaacgggtcataattccctcttgcaaagagcatgaccgcgctggcaatgatcaggtcataaccggttccgatgccatctgccaggaaatctccgctgatgatctgcacacgatccagaagccccgcgctttctacggattcccggatcacctgctccggcatccggtccatcagcgtgccggtgcgctccggttggtcggcgatgaccgccaatcccagaagccctgtgccgcagcccagatcaaggatattcccgatcttttcattttccggcagtgtgcgcacgatgcgcaggacctcctcctgccggtaccctgtctgcgcctgccgcatcatcgctcccatagccgcgaaatccaaactctgctcatttgcctgctgctgcatgggctgggggccctctgtcaccagcttcaccacatccatggggatcatgccctcgctcatcacataatactggatgaatccgcccagatattccggttttccctggacgagataccgctcggcctcctcactgttctgataggtatccccctccttgactacgaacccgatggaggtcaggccgtccagaagatatccggtattcgcctcgttccagcccatttcctccgccagttctttcgccgttgtcttttcactcagatgggaataaatatccaactgaagggatcctgtcactaccttcgtgtaaagcggcagaaatgctacctgcgtcaattgctcccaaacacttttcctgtccatgataattctcctttcaacctttaaattagtttcaactaacccatgtttatataataaggcagccgatatcccgcgctgcctgtattataactgattaaccctggacggcggctctttgccctccatcaatgccagtatccctttctcaaatacttttgccacttccgtcatgcaccgtatgatcttatcccggtctgtctcttccaggatcagcttcgcgagcatggagaaataaccgctcatcagcagccgcaccgtatccttcgacaatggctgtatctgtgcatttgctgcctgtgcgctgctctggatattttcgctgttgcattcctgcaggctctcccagaaatgttcatattttgtgccttgggagccggtaaggatcaggcggatctctttcggattcgccagaaggaagtccacgatctccggaatccgacggatatagaccccgcacatttcaaacaggcgtctgtccggcggcagggctctcatctcctgcctgacaccatccagcagtgcggtaaattgtgatactgtctcatccgtgagggcatagaacagctcctctttattggcaaagtacccgtagaaagccccggtcgtcacacctgcctctgccacaatcttacggagcggtgcccctttaaaaccatgttttaaaaaactgtccatcccgtactgcaggatccgctcccttgtattttgaagttccatgctttctccttataactaagttatataacttagttacattttacacagaggtctcctttttgtcaacaggataaaaaaggacgtctgctaagcgggttcaattgctatgctcactgttccacgctcttgttatcatatttttggtaacgataatgccctgcaattcccgcagcaaaggtcagcactgctgccagaaaagtcatgacaatcttaaaatcacctgtgcctttggcaaaatcagcataaaaatctatcgaccaaagtaccatagcaacaaaccacaacagataccatctttttttcttcttcatcgcaatcacctccatatatccccggtcacttactgtgatcatagtggcagtcgcagtagggaccgccagaagccagggtaaactttcttgtaaatttcgtattgttcatttccgccatatcataatcaaaggcgcacatggcgggaatgtacttggaaagtcccagctgattcatcatcgtacagatgccgcaagtatagaaagtagcggtgtattgattgatcgtttcgccgtcctccaccgtaaatttccagtcataaggattggtaatactttggcttttttcggcaaaggcctttaaccttgcccgtcctttttccgtgtaatttctttcactgacaaccgtctttcgcatgatcttattatccatcgctgttttgtaatagatacggacggtttccgtatcataactcttctcggcggaaagcagcacagcacacagcattgcacagcttaggatattggtaaggaaacggctccccttgtcaaactcgtctacgccgcttaagatttccctgtattttttctttgcacgcttcatcacgctgtccgcgtccttttcgtcgaacactgtccgaaccgcctccttaaaggagccgcgaaacatcagccacattgcgcgctgtatcaacccgtaccgcatcattttctccttttctttattcgtcagccaatcagataaatgcagttatcactcccaccgcaaggcaggcgggcagaccgagaagcataccaatacaggactgcctgatatgaaaacggtagtccttatattcttccatagcttccgtacccggtatcctgacctttttggaatggcagaaccagatacagtcaaggatgagcgcgtcataccagtcaatgatcagccagatcagataagaatcccagaaccctttccagaacgtatccgctccattcagccatttcaagatgaaagcaaagatgaatacaaaaacaacaagggcaatgcctttcctgaggatgtccacccttgtgaagcgctgctgtctgtcctcaatcagccccagttcgatacacttattccggatagccggaggataatcgcccactgaggcaagaggatttttcagtgtcagcgacacaatcaaaaccgtgaatagtacaatccctatcaggctttccaccataactgccatgtccttcacacctcctgaccaatctgagaaagcaagtattcatagacaatggatttgtgatcagatccatccccaaaaggcttttccgccgcctttttaaagccgcgtttctcataaaactcccaggacacaagcgtatttgtaaaaagccggacacaatcagcgccatcgttttttgcccgcttcatgaattgctcgactaatgcggtccccaagccttttcggtaatcctttctggatgatagggcgacaagctccagatcgcatttcccaaaggtttccttatccctttcctgtgactgacggacaaaagcatcaaactgtttccggaatggcgctgacagtttatatcttttcagatagaacttgaggaactttttacaccaaaaccaatagtgcctttttgtttcgtgctgagctgccagtgtcttgctgaaattcttattatattctccacagataaatcctacgacctgatgatcctctgtttccgcaacataggtaaaattacatttttcaaccagaatttgcgcgtaatcacgcagcagcatcctgtcgttctgatccacaggacatgtgaaaaatccctcgtagaaacaatccccgcaggctgcggcatcttcttccttatatggacggacaataaacatggcgtatcctccaatctgctttatttggttaactatataattatatcgtgtctatcctgctttcctgcaatggaatacgccttctgacctaaccgctttcactgacaccttttcatacagctttctaagccgttgttccaaggagtctctcgtatcaaaaggcggtgtgaaataccccatttttacataaagcccttgcacgaaccagtccgtccgtttcccttctccgctgatgtaaaaagctccgcagaacagtccgcccggcttcaagaccctaaatgtttccgaaaatgccgcacccttatctggaaaagcatggaagccattcaatgataaaacaatatcaaaactttcatcagcaaagggcagttttcctacatctccctgcctgaaacagatattattaagattcatctgttttgcccgattctccgcccgtttcatcatatcttccgaataatccagacaggtaatctgcgctttcggcaaagtctgatagaggggcatcgttaaaatccccgtacctacaggcacctccagcagactgcccgaaaaattctccggaatctttgacagcgccaatgcaagataatggtcgttgatcttctggtccatatcccacaccaatttgcacactgcctttccggggatcgtagagcaggtaatcatcccatcgtagaaatccccctcttttccgagcttgtgataagctgttctaatttgttttgctctttttatctcctccatataagataaccctcctcgactaaccgttcctttttcccctattctttaagcaaagaaagcacttgtttccggcatcatgagtaaacagacgctttaaaaatcatgttcagtttggtgttttgtaaatgagagactttaggaagtttcagggtttccaacagtatccatgtgcctgcggagcagccatacatcacatcgatttttccatcaaaatgctccttgatataggctgccgcacagtttccctcatgctcgtaggagttttcaaggacggcataaggaactacggcatctttttcttccccattgaaggcgtcataagcaacgatgatcagatgaaaatgcttacccgctgtctcaacaaagggcatcgcagccggattccaatagacgcctccacctggaaatatcataagtgttttatcgttcccaattccaaattcagtgtacttcatgttgattcaatcaccccggaaagtttcattagatttctttgccagaacacacagccaatgcttcttttcatcggaaaagcttttcgtttctgaaaaacccacggatttcagcgcggcgcagatttgttccttatcatagattttcatcccgctgattttctccgtccatttttcatcggcagtattcattccgtcactctcattgcatatcataaagataccgccgctcttcaaaatacgatatacttccccaaagcatgcctccaaacccggccagaaataaatcgtctcaaaggcggatatacaatcaaatgtgctgtctgcaaacggcatatccgccacattgccctgaacaatttcacagcggtgctgcttgatcgcggcgctgtttcgctttttggattcttccacactgacttttgaatagtcgattcctgttatatgaccgtttttacatttctccagccaaagcgcgatattagctccgccgccgcagcctgcgtccaatatttttgcatcttcctttacggaaattttggaaaatccccagtgtgccagtttgctgtgcccactgttcatcatttttaccatgatttttccgctgaagcctttcggcctgcgcgtattttcaaaaaatcccattgtattacgctccttctatcaatctgccccactgaaataccgcaagacgattattgatcttggcagtgaggactcccacaatcctgctcaccagtgtggatttcttcatctgctccgaaaaactgtgttcgctgacaaggcgcagctttggctccagtgcctcaaattctttccccgattttgttccccagccgaattttgcacctgtatgctttaccgtatcatgctttttctcgtccatcatggaagggcgcatcatttccacaagcagatacccactgccaaattcagaaaccagattgcgaagtattgtgtgctgctcctccttactgaaatacataaataagccttccgcaataaacacaaccgttttttctccggcaacatttttcacggtgggaatccagcccgtttccgtcacacttcctgccagcatcctgcggcggtctatttcttcatatacctttttcctcacagcaatgctgtccggcaaatccacatcaaaccatctgatttttccgttgtcaacccgctcaaaacggttgtccaagccgcagcccatatttacgcataccgcgtccgggtattctttaacaagccgctttactatctcgtcaaacataatcgtccgcgcaatcacgcactcgtgagtaaccagcttatcataattctttgtgtccacgccaagggtctcaatgatttctaccgccttttggtcccgcactctcggatttttccgctttgtttcgcttgcgcggttcgacagcggaatcagagcggtggtctccacatctcctaatttcagtttcattgtctgtttcctttttattttctctttatccatggaatgcagcggttcccccttttgcagtattcctcatgcagactgtatttttctaccatgacatatcatcgcccaaaccatcataatcccaaaccagacaatcatgctttcactcataagcccgtttgtaaatccgagccggaaggcacagtcaggcataaaagattttaccaggtataaaatcccgtatatgaccagaacattcgtaaacgccatacctttaggaaacattgtcctgccagatatctgaagataaaaccaataaagaaaaggtggcagcatgatgatttcgctaagtatcacaagccatgataagtgggaaaataatgcctccgacgcagggattgccgcatcctcatatccgtttctgttcagccatgcaaaaacatataagatcataatataaaacaaatgcaggcacagccatggagtaagtccatatgtagtaagcgtccggtaaattttcctgtgtttttcttcttttataaaactgcacactgaaaacagccctatgccgtaaaacacgattcctggaaaagcaagaaacattgccagcgaatttctccatggtgcaatcccggctactccctcagtaagccagtaaagtgcgcctctgtgggcagtatccccgtacagcatcagccaatcgcctgcgccaaaacagacacagcccatcattccgaatatcaatgggataattcttttcattttattgtccatcttccctcatctcacaattgctttatttttaacctctttttattatagttagcatcagctaacctgtcaattccaaaacgaggtctgttaattgcgctgcttgtaaatttgatatccgctatccatgccagcagccgatgagtaggcttcaccgctgggtcatccagtctctgataccccagcatatatccccggcagtgatctgaaaccggtctgaccacaatcctagttctgccttagcatcacgctcagaaaaaacatctatctccatgaggcgcgtcatgcctttcttggtcttgcatggagaatatatttgagaatgaatctcattaaacaccttgaatctttccccgaggtttggtaaaatatatttggttagttatttctaaccgcatgtgaataaatcatggaaactccttttgcctcttatgcctgaacaggggtaaaaggggatccgtgggaaaggatgaaatggatgatggattatttagagattgaaaaggttctcggacgggaaatcattgactcaagaggcaacccgacggtggaggcagaagtttacctcgcggacgggacagtcggaagaggcgcagctcccagcggcgcatctaccggggaatttgaagcgttggagttaagagacggggatgaagacagattcgggggcaagggggtttccaaagctgtagaaaatatcaacaccgtgatcaacagtacgcttcagggaatggacgcaagcaatatttacgcggtagatcaggcgatgataaaagcagacggcacaaaagataaatccagcctcggcgccaatgccattctcgcagtatcgattgcctgcgcaaaggctgctgctgcttcccttgatatcccgttataccgttttctgggcggagtgaacggcaaccgcctgcctgtgccgatgatgaatatattaaacggcggagcgcatgcggcgaatacggtagatgttcaggaattcatgatcatgccggcaggcgcaaaaagtttcaaagaaggcttaagatggtgtacggaagtgttccatgcattagcggctcttctgaaatcaaagggacttgccacatccgttggtgatgagggcggcttcgcaccggaccttggaagcgatgaggaggccatcgaatacattctggaagcagtaaagaaagcgggttatgaaccgggcaaagactttgtgcttgccatggatgccgcttccagtgaatggaagagcggcacaaaaggagaatatctgctcccgaaatgcggaaagaaatttacctccgccgaattggtggcacactggaaagccctgtgcgagaaatatccgatctactccattgaggacggccttgatgaagaagactgggagggctggcagatgatgacaaaagaactcggcaataaagtccagcttgtgggagacgacctgttcgtcacaaatacagagcgtcttcagaagggcatctctatgggatgcgggaattccatcctgatcaagctgaaccagatcggatccgtgtccgagacactggaggcgatcaagatggcacataaagcgggatatacagcggtgacttcccaccggtctggggagacagaggatacgaccatcgcagatctggcagtggcgctcaatacctgccagatcaagacaggcgcgccgagccgcagtgaacgtgtggcgaagtacaaccagctcctgaggatcgaggaggaactgggggaggcagccgtttatccgggattcggggcatttaacatcagtgagtagttccggcccgccagatactggcggaaaagaacaaaaagttccagccatttatagattccacaaagaaagcaggcatcggcagaatttctccctttgcctgctttccttttttaagaacatccacggtctccggcgctcattcctgtgactgctataattcttaaagcagctccaacacttcttctatcccctttttcccaaaatacacctgctccccatctatgaccatgcaggggacgctcatgatctggtagcgttcttttaactccgggaaatgtgccatatcataaatatccgctgtgacaccggctgattccagcgcggtgcgctgtaccgccatgaccagctccgggcacatggtacacgacagggaaaccaccacccggattcggtgttccgctctcagggaacggatcttctccagtgtttccggtgcgatgggctgtcccggtccggccgcgttgtagagggcgattacaaaggaattgaattcatgcccgcccggcacaccgtggaaggaggttcccagatagttcccatccccgtcgcagatgcggatcgccggatattcgatccccactttttcgtccccatctgcctttttagcaaaacggcaccggatcttcggggagagtgtctccatctccctgccgaagccctctacttctcttgagatggcgctgtcgtcggtacagaactccagagtgatgtccttttccagacgttccagcaccggggcgagctgccgtttcacctcgccgcttaagaagccttcagtatcatctccgtctttgtctttgctggattcttcttccagcgcgccttccctcctgctgactttttgtttttcaagacccagcttttcatacatggaggaaatatgcttctccatagacgtcgctgcaaccgcgccgtcggagaccgccgtgacgacctggcggagatttttcacacagatatcccccgcgccgtatacgccgtccacgctggtcttctgattgatatccgtgacaagatagccgttctctgtcatctccactttatctttaaagagcgcgtttgcaggtgcatagcctgcgaagacaaaaataccgaagccttttcccgcttccggctcataccgccacgtctttcccttttcctcaaataccgcgtactccagcttcccgtttccgccggcctccctgatctccgtttcaaaatgcacttcaatatcgggatgggcaagcacctcctctgcaacggaatccgcgcagctgaaacttttcccacggaccataaggtggatttttctggcgtattttgtgaggaagatggattcctccgccgcggcgaaaccgccaccgatcacaaacacatccattcctgtaaagaactcgccgtcgcaggtcgcgcagtaagccactcccctgccccggaactccatttctcccctaaaaccgatcttcctcgggctggcgccggtggcaaggatgatgccaagcccctgaaaggtccctttatccgtgacaacggacttcatatcagcgtccagatccagttctttcacctcagccatctgaaactccgccccgaaatactccgcctgcctgcgcatattctcagtcaggtgtgtgccgtccgtcttaagtacgcccggataattgacgacctctgaagtgatggtgatctgaccgcctattttttccttttcgatcacaagcacgcggtattttgccctcgccagatagatagcggcggtcagccccgcagggccgccgccgatcacaatcccgtcgtagaactcttccgcgcgctgatctacatatcgttctcccttgcgctgttcttccatacgtgatcctcccat

SEQ ID NO: 62 - DNA, 17812 bp, unidentified
  source 1..17812: mol_type = unassigned DNA
ttgactaagaatgcattggatatgattgatgagaaaatagtagagctgctgcaggaaaatgcacgtatagcgataaaggagatagcggcacaggtgtttttgtcatcaccggctgtaacagccagaatagagagattggagagcaagggaatcataaagggctatcatgccactgttgattcggttaatctgggctataagataaaggcttttgtcaatctggacctggagcctgtacaaaaggaagagttttatccgtttattgagagtgtggagaatgtcatagagtgcaattgtgtgacaggagagtattctatgctcatagaggtggagtttttgaatacggaggagcttgatgactttatcaacactctgcagaaattcggcaagacaagtacacagatagttttttccactcctgttgagcacagaggcctgcctgtacattcaggttttgatgcataagatgatatgagagtcaaaagatattttgcatgattgaatgaagtgtgctaaaatagtttgcaaaaatactgactgttaaacatgattttggatgctttgaatagtcagatatattgattacggcaggaggataatatgagtaagaaattaggcttcataggttgtggaaacatgggaaaggcaatgatacacggagtgcttgcatcaggcaaggcacaggcaagcgatattcttgcatctgcaaagaccgaaagctccagagaaaagaatgctgcagagcttggaatcaggctgacagcggacaataagagcgtagcagagtttgcagatattctgtttttagcggtaaagccacagtactatgaggaggttatagcagagataaaggacactgttagtgacgatgaaatcattgtttcgattgcaccgggcaagtcactttcgtggtttgacgagatgtttggaaagagcttaaaggttatacgtaccatgccaaacacacctgccatggttggtgagggcatgatgggagtctgtgcaaatgaaagagtatcgcaggaggagcttgatacagtgcttgatttgtgctcgggcttttcaaaggctgagatgatagacgagaagctcatggatgttgtgacagctgtcagcggaagctcaccggcatatgtgtttatgtttatcgaggccatggcagatgcggctgtagcaggcggcatgccaaggagccaggcatatacatttgcagcccaggcagtgcttggaagcgcaaaaatggttctcgagacaggaaagcatccgggcgagctcaaggatatggtgtgctcacctgccggaaccactatccaggctgtgcgtgtgcttgaggaaaagggcatgagaagcagtgtttttgaagctatgatgaaatgccttgatatctcccgcaaaatgtagtagaattattgcattgagttaaaggagaaaagcaatgagtcaggcaaaggttgataaatataagaatgaaaaggcaaatcgtaaaaagacaaatgccagaaataaagtaaagcgtgttatagcacgaattgttgcagctgcggctgtagtcgcattggtaggctggggcggttactccggatatcagtactatgagaagagtcgtccggtgaactgctattacgcggatatcagtgctgtcagcgattatctacagggattgtctgcagacagtgagcagtagattatatttttgatacataacatatattttacgatttatatgattaagttaaaatgcctcgcaggttactgcgaggtattttcagtttttgaagaatccccgggctctttttgggattcagatacagtctttgcattttcttcggtatttgaggtgtcagatttttttgctttggagagtgtgttatcaattgcgttgagcagcactttggaggtgtactgacttgtgtttgcgtaggaaatattatcggtggattgattttgcacaatctgcgatacgagctcgttcatcgcaggctcaacaagcggatacatggtttccaccgaatcagtcatgttttcaaggcttatggagttaatattattgctgtccaccgccacagacacatcgatagccgccccacccagcgctacagatgtgttgtacacacccggtgtatacatgccggtttcttccaccttgggctttggttcatcacctgaaaaataatatgtagcagcgaaaattatcagaagaagcagtatgccaaggagcactccggtcagaatgacatgcttcatttttacaacaacgatttttgtttttgcactcatatgcgcctcctgtggttgttttatatataatatgtgtggggatgcaaaagtatgacagatattcctgtctataacgaaaaagagatatccatcaaggatatctctttatgttataagagcgatagactggcgcaagacgtccgggggacgtctgttctgcgccgaccgtttcacggcttccggggggatcctgaaatccttatgcaaatgtataagctatactaggtacataatcaatgatgcatccgttgataaaaaccaacacaatttaggagaaattaaaggttgagaactaaaacaactatcactttccaggaattgatatgcaggatgccttagagtgtttaaacaaacgcaaattttcttaaccaaataagtggttaattaaccaaaccgtgccaaggctagacaaagaaaaaaccttgtaaacactgggtttacaaggctttccgtaaagagcgatagacggggctcgaacccgcggtctcgaccttggcaaggtcgcgcgttaccaactacgccactatcgcatttattaagttgtgtgctctcttgtgtcgagcacgtgttatataatacacgatagaggagcatctgtcaaccacttttttagatttttttgtaactattcaaagccaaatgttttagtctttatttacatttgtgtgtctaatgtataaacagtataattatacatttcacgaattgcgtatgcaattagaaaatcaagtagtccaaattccataaaatgaaattttagggcaaattacagacattagcttggctgtagtatttttaaacaacatgtgttagactactgttatataaatcggaatatagtgagggactataaataccattacttcataacggggaggtgagattttatgtattatagtaatcctcagaggtacaaaaatggagatagataattggcagactatgatgctaatttttgaggtggtgtgtagaattttcaaaaaacaaggaggaaaatatggaacggtttattcggaaattatttggtttaacctttagtgcattattggcaggtgtgcttttagtaggttgtatttcgaaggatttaggagatgaaaaatctatgaacataaagatagatgggatagaacagattacagtatcaactcaaactaccggacagaaacaagatgttataatagaaaaagaaaaatatgaggatttgataagtaaacttaattcgtattcgttaaaagaaataacagatgaaaaatataaaggatggcagtatttgattaaaatagaaaaaaaggggggagaaattactctaatatgttttatggataataaagtcaaagtgaatgacatcgtttatgaagttagagattacaatattgatgacttttcatatctgtttgagtgaattttgaaacgaacgtaaaagtgatgaatcaaaataaaaagcccatgagaatttttctcataggctgaacaaagataatgataaatgattttttacgaaaaaagcggctatctcaaaggatagccgcttcaactgtagacagaagtatttctataacttaatttttcaaaaacagaaaccttaaaaaaagcagtattattaaaatgatagaaacatatttttctgttttactgactgtttgcataggaaagtatttctctctacagaaagagtaaatcatgctacaagcaagtgaaatagaaaaaaatattttaaaattcatagtatctatgtgctcaggacaaaacatcataatagcccaaagaatcacgagccaaagaactattatatagtggaaaattttttgaatcttattattatccatatcaatcactcctttctttaaaagtgaaatagacagatgtcttacttgtttcaataaccaaaggaattacttctttcttaaataggtttacattagttttgtgtcaacaggcaaaaactatgactataaaagtcaccaataagtaatattaagtcattaaaatgataacacaaatcctttctctaagtcaaatattcagaagtataatcgcttcacagcatccatcgcaagcatcgagcgctcacattcttccgccgagagtgtaatctgccagcaaagcggactatctatcatatgctttgccgcatagcttagaccataattcccttcacctgattaggtgtcatgttctgcgcttcttctattataaggttatctgaaaaaatttaaaaaaatttcaaaataactgttgacagatgctcctctatcgtgtattatataacacgtgctcgacacaagagagcacacaacttaataaatgcgatagtggcgtagttggtaacgcgcgaccttgccaaggtcgagaccgcgggttcgagccccgtctatcgctcttataacataaagagatatccttaatggatatctctttttcgttataggagtgaagcggagccgctcgctcgtggctttcgccacttgctttggagtgtttacaagtgataaactttctcattaagtccgggagggcgcatggtatggggatttgagggcatggattagcgctgactgcgtgagattaggcttgaataacagtatttccgggaaatataatgtttcttgtaagtaaactttaactagaatttttgtaaatatacaggaggaaaacattatgtcatttaattggaaagcttcaggtttattcgcagcaggtgttgcttttggtacagcaggtatcaagattttatcaagcaaggatgctaagcgtgcttatacacagtgtacagcagctgcgcttcgtgctaaggattgtgtaatgaagactgttaatactgttcaggagaatgcagaggatattcttgctgaggctaagagtatcaacgaggagcgtgaggctaaggcagaggctgctaaagttgccgatgcagctgaggatgtctgcgagtgtgctgaggctgatgagcaggaagcagagcaggctgaggttacagcagagactgctgaggcatagaagataagaggcggtcatatgaaatttacgattaagcatgagtcaagaggccgtatgcgtgttcatatggagcagtaccgcatgacatatgagcaggcagacactctgctttatgtgattcacaatcacaggaatgttacctttgtaaaggtttatgacaggactgctgatgctgtgattgagtatgtaggagacagagagcagattatagagctgctacgccactttcattatgagagcgccaatgtgccacagactgttatcaagacatcaggaagagagcttaataattcatatcaggaaaagcttatcggaagtgttgtctggcattacagtaaaaagctcctgctgcctttgccaatcaggatagcgcttactattggacaatctgtaaagtatattggaattgggcttaagtgtctgctgcagagaaaaattgaggtgccggtgcttgatgcgactgccatcacggtttctcttattactaaggatttttctaccgcaagctctattatgtttctgcttggaataggtgagctcttggaggaatggacgcacaagaagtctgttgatgatttagccagaagcatgtcacttaatgtgagcaaggtatggctcaagacacctgagaatcaggagatactcgttgagtcttcaaagattgaaaagggcgacaaggttgttgtccacatgggaaatgtcataccgttcgacggagaggtcttagatggcgatgcgatggtcaatcaggcttccctgacaggtgagtcggttccggttcaaagaactgtcggcaatactgtgtttgcaggcactgttgtcgaggagggcgagattactatcagggtcaaggaggttgaaggaaacaaccgttttgaccagattgttactatgatagaggagtccgaaaagcttaaatctgagctggagggaaaggctgagcactatgctgacaagcttgtgccgtggacgcttggagctacagggcttacatatcttctgacaagaaatgtgacaaaggctatgtcaattctcatggtggatttctgctgtgcactcaagcttgctatgccaatctcagtgctttctgctatcagagaggcaagcctttataatgtaacagtaaagggaggaaagttccttgaggctgttgcggaggctgataccatcgtctttgacaagacaggtacactcacaaaggcacatccgactgtggttgatgtggtgaacttcaatgatgagtattcatctgatgacatgcttcgtgtagcagcctgtctggaggagcatttccctcattccatggcaaaggcagtggtagacgctgcttctaagaaggggctttcccacgaggaaatgcatacaaaggttgagtatattgtggctcatggaattgcaacctcaatcaatggcaagcgtactgtcatcggaagctatcatttcgtctttgaggatgaaaaatgtgttgttcctgcaggaaaggagtcactgtttgagttgcttccgctgtattattctcacctgtatctggctattgagggtaagctttcggcagttatctgtattgaggatcctctgcgtgatgaggcagcggcggttgttacttcattaaagaaggcgggcatatcaaaggttgtcatgatgacaggcgacagtgagcgtacagcttctgtcattgcgaaaaaagtaggtgtagatgaatactacgccgaggttttacctgaggacaaggctgcctttgtggagaaagaaaaggctaagggcagaaaggtcattatgattggtgacggcataaatgattcaccggctctttcagcggcaaatgtcggtattgcaatcagtgacggtgctgaaattgcacgcgagattgccgatattacggtgggctctgacgatctctaccagattgtaactcttaaatatataagtaatgctcttatgaaacgtataaagagcaactatcgaaagattgttggttttaactcagggctcattgctcttggtgtggcaggtgtgcttccgccgactacgacagcacttttgcacaatggatcgacaattcttatcagtgtgaacagtatgaagaatctgcttgagtagattttggatgtagtacggggcgctgccagcggcagcgccctttacattgtggtggaaataatgtaggaattgtgataaactaactgataagtagtgcagattatttttatatgaggttagattattgaaggttgaagaggttataagcagggttgcagacagtatggacgcaaaatttgagagacgttttaaatctttttgtaattcactagatgcgttagctgaggccaggcagagagaccttaccgattcgtttgttttgagtgggacaggtgctaaatttagcattacttttgatttatcgtggaaggtaatgaaagatattctggtacaatattattcgataaccgggtttgttacaagttcaccgcgagaggtgttacgtgaatccttcaaggcaaagctgatttctgatgatgcgtggatggatatgcttaaggtcagaaatgaacttgcacatgactatgattgtgaggttgtaaggacacattgtaatacaattgttgaaaaatatattgatttgttttatgattttaagaatacgatagatgaattattgaaggttggataaatttttacgtagatatatctaatgcacaaaattaacacaatatagtaataaaacatagaattaaagatagcgatgacaaatatagaagttgaaataaacgataattatatatgtgtatatgagaggcttaatgacaattgcattaggcttcttcatatgtatgggaaaaatccggtgtgtgtggtgccggatatgcttgacggcatgagagtgacggagcttgcggagtattgcttttctttcaagagcatgcctgaaaaattgaaaacagagcttgggattgatgatattctgcgtcctgatatgacggagctgtgtgatgattatatcgagagggtcatattgccggacggaatgcaaaaaattggcaggctgtgcttttataattgttcaaggctgtctgtgcttgagctgccattcgacatatgtgatgtggatggtgacgctttcatgaactgcacaaaactttatatgcttgtgatgagaggctcaccgaaggataagtcgtgtcttaagcagattctttcacagataagcactcttgtgagggttagatgggctgacagcgatggaaatgcgattgcgcaggcatgttttttcgagtacgaccagacatatgatgagattggtcctgctcatatttttaaactgaacatgaacggagaaggttttcgcgccagacaggcttttatggaccgcgtgtttgtgtggaagcagtatgatgaaatattttcagaggcgattgcgcaggagagtgaggatgaccttttagatatggctttttacaggcttatttatgcgtatgagctttcaaaagaagctaggcagcagtttttggagtatattgtcaatcataaaaaaaggctgtctgagcttatcataagaaaaagggattcgggtttgctgcagagttttctggagcttaaagacggtgaggagaattttatcgcagatgtcctggctgttactgatatgcttgcacttgcagcacaggatgaatggagtgagggcagtgtgattttgcatagatttaagaaggaaaatctgtcggtatccaggaagaggcggtttgaattttaaatttaagtgtaaatgcaaaggttatgttattactaaaaaatatttgacttttttcaaaaataaaaatataatagcctatgaacgagtagcagactagcgtaaatccagtttagctgctcgtttttttgtgcacctgctgtcgcacatcattaaaatatatagtgcattataaagtgtgtagcttatcagcgtaagtccagcttatgagataagagcgcactttttttatgcagaaaaggaggaataagttaagatggcagaaagtaacaagatgaaggacatgccggtaaataagctcatggtacagatgggaataccgatgattttatctatggcattgcaggcagtttacaatattgtagatagcgcctttgtgggaaatatgaggtcaggaagtgaggctgcacttaatgcgctgacactggtatttccggttcagatgcttatggtagcagttggaattggaacaggagtgggaaccaatgcacttcttgcaagaacacttggtcagggaaatagtaaaaaagctgcaaaggttgcaggaaacagtttatttcttggtgcaataatttatatagtatgcctgttgtttggaatttttggagttaaagcttatatttcatcacagaccgttgatcctcaggttatttcaatgggaacaaattacttgagaatatgctgtgtgatttcatttggaattattttcttttcactatttgaaaagctgctgcaggcaaccggacgttctctttattctacaattggtcaggtagttggagcagtggtaaatattattcttgatcctattatgatttatggtattggaccggttccggaaatgggagttaagggcgccgcatatgcaactgttatcggtcaggttgtgtctgcaatactgctgtttgtgtttcatatgaagctgaacagggaatttgagcatgatacaaagtatatgaagcctgatggaggaataatcaaggaaatttatgcaattggacttccggctattattgcacaggctctgatgtcaattatggtttatgtgatgaatcttattttgaaatttagtccttcggcgcagactgcatatggtttgttttataaggtgcagcagtttgtattgttccttgcattcggactaagggatgcaattacaccaattatagctttttcatatggaatgcacagcaaaaagagaattaaggatggcatcaggtatggattgctttatacgattgtgcttatggtcatgggagtagcgattacagaaattttcccgggagaatttgctgctttgttcaatgcaggagcatcaagagaatattttatcggggcaatgagaattgtttccatcagctttatttttgccggaataaatgtggcatatcagggtatttaccaggcgcttgatggtggtatggaatcgcttgtgatttcactgctcagacagcttataattatattacctttggcaggcatcttctcattttttgtaagaggcggacatattggagtttcgctgatctggtgggcatttccaatcacggaggtgactgcttgtattgtaggatatttatttttaaagagaatcaataaaaataaagtggaaagcttaaattaaggaggcataagccatgacaaaaagaatcattacgataagcagagagtttggaagtggcggacgttttatcggagaagaagtcgcaaagaaacttggaattaaatattatgacaaggaaataattggacagattgcaaaagagtcaggactggcaccggagtatattaaggaaaatgctgagctgtccccaaagaaagggatttttgcatatgcatttaccggtcgtgatattacaggaaaatcagtagaagatatggtatatgaggcacagagaaaagtgattttggatttggcagaaaaagagccatgtgtgattattggaagaaatgctgattatattttgaaagacagggatgatgtattgaatgtgtacatccatggggatatgccggaaaaaatacagcgtatctgtaagctgcataatacttcagaagctgatgcagtaaaaatgataaatgacatagataaaaggcgtatgacaaattataatttttacacagatcagaaatggggaaaagctgctaattatacgttgtgcctgaacagctcacagctcgggtatgataaatgtgagagtataattattgaatgtgtatagtgtaataaaatacactgtttaagatattgtttgtgcattacattttattgagaaaataaggttactatagtataataaactctgaaaatattgcagcagaataataggggttgtgaagtatatgggaaaggaggccgcttcatgaaaaaacatatccagacagattcagagtggcaggaggaaatgtcacagaaaataatagatgaaatacagtgcgagttgtatctcgacatgccttttatgaagctggcgctctcggctctttccacaaaggtgaacgagcagctttactccatggcaactgacggcacatatatttattacaatcccatcaggctgattgatatatttaagaaaaatggcatgtatctgaaccgggcttatctgcacagtgtactgcactgtctgttttttcacctgtggactaaaggtgagagggatgaattactgtggaatacagcatgtgatataatggttgagtacacgattgatacaatggaaaagaaaagcacaaagcgtatcctaagttatataagaaaaaccacgtatgagaggcttaaaaaagagcatatcgtgattgctcccggagccttgtacgcgtggctatacaagcagtatgcagaaataaaggctgaagaaatcactgatatagatgatattgcaaacacaaaggataaaaatgagcttgcacttctggcacgggaattttacacagatgaccacgctttgtggccggaggagaaaaacgacaatgctatgccactaagctcatccgaggcccaaaagcagtggcagaaaatatccagacagacacgcatggagaaaagccattcaaaggacagcaaatccgagggcgagcaggtaatgatgagggaactgtccgcgaaaagaagcagacgaagctacaaggagtttctgcgcaggtttgcagtgcttcgtgaggaggtacacgcagattatgattcctttgatatggggtattacgcgtatggactttcgctttacggcaatatgccgcttattgagcctcttgaaacgagggagacatacaagataagggattttgtcatagtacttgatacgagctattctgtgagcggggagctggtggagcactttttacaggagacatttacgattctcacggagtcggacagcttttttgtcaggaataaaatacgcatcatacagtgtgatgacagcgtaaagactgacgaggaaattacagatgaaaagcagattaagccgcttttaaacaagtttacgctcgtaggaggcggaggcacagatttcagaccggcattttcgtatgtgagagaccttttggataagggtgagcttaagaacatgtgcggacttatatattttactgatggcaagggaattttcccggcaaagtgtccatcgtacaagtgcgcatttgtgtcggttggtgcatatgagggtaatgaggtgccgccatgggcgatgcaggtggagctggaggaaacaatatgaatataaaacaggcaaaaaacgaagtgaaaaatacagtgaaagcatacctgtcaaaggatgcacatggagagtacgtgataccgcagatcaggcagagaccgatgctcttaatcggaccgcccggcgtaggcaagacacagattatggagcagattgcaagagagtgcaaaataggtcttgtggcatataccatcacgcatcacacgcgccagtcagcggtaggactgccgtttataaaggagcgtgagtatgacggaaagagctattccgtcacggaatacacgatgagtgagattatagccagcgtctatgaaagaatggaagcaacagggcttaaggagggcatactttttattgatgagataaactgcgtgtccgagacacttgcgcctacgatgcttcaatttttgcagtgcaagacatttggtaatcaggctgttcccaagggctgggtgattgttgcggcaggaaatccgcctgagtacaataaatcagtgcgcgattttgatatggttacgctcgaccgtgtcagatatatatcgatagaagcggactatcaggtgtggaaggaatatgccagagatgtgcatatccatgatgcacttttaagctatcttgagcttcacccaaacaatttttacagggtggaaactgacgtggacggtatgaatttcgtcacggcaagaggctgggaggatttaagcagcctgcttaaggtgtacgaggcaggagaaattgcagtcacggaggatgtaataggtgagtttatccaccatcctgatatagcagaggatgtgtacgcatatctggaaatctacagaaaatacaatgaggattacggtataagcgatatattgtccggaaacgtgaaaaagtcagtatataaacgtgtgtttgatgctgattttgatgagagaatcactgtggtgaatctgcttttaagcggactgacagttgttttttcggatgtggccagagagcggaaaatggtgcagctatggtatgagtttctgaaggaatatagaaagtcacaaagaagccctgaagagcagcatgcgctgtacaacagtgctgtggaacagttttcaaagaatatggagatattgaaggagagctctcttattttgccaaaggagtattacatcagacaggatgtcttaaggcatatcaagggtgattttgatacggtgatggatgattttaccgaagaatctgagaagctttcaacgatggaggatgctgcaggagagaagctaaaccacgcatttgattttgtggaggatgtattctcggacggccaggagatgcttgtctttgttacagagctgaccatcacaccggaaatcagcagctttttagctgagaatgagtgtgaaaaatttgatatctacaatgaaaagctcatggttggaagcaataggactaagcttttaaaggagcttgagagataaatcctgttgatgtatgcagagaagatttgaaggaattatctatgatttatatatttagcgctttttatgctgaggcaaaaaatataatagaccactatggcttaaaaaaggaaaaaagccctgaaatggtgagatttgatgtgtttgcaaatgagagtatcaggcttgtgataacaggcgtaggagaaatcaatgcggcggcagcggtttcaaatattggtggtgcgtatgggatttcaacggatgatgagattttgaatgtggggtgtggcgctggttttagcagtgatatctgtttgggcagtatatttctgggaaacaagctcactgagcagatgacagggcgtacattttaccccgatatgctgatgaaagcaaatttcagggagtgcgaaattgtaacggtcgcaagggtgcttaatgaagggtgcgattcggttgtatatgatatggaggcagccgccgtttatcaggcagcagcgtttttcgtgggaccgcatcgtatgcattttataaaacttgtttcagatgccggtgagagaattgaccagtcgaaaatcacagagctttttgctttgcaggaagacaaaatatgcggctatattgatatacttttaagtgtaggtggtaataaaacttcaatagatgataagactaaaggcgaaaatatggcagacggcaatgcgacagatgatactaaatccgcttggaatattgacaggctgaccagcgatatgcgctgttccaaggtaatgggagatcagctggcacagcttataaagtattgcagactaagtggtatagattataaagctgttctggatgagtactatacaaatggcttgctgccgtgtgagagcaagcgtgaaggaaagaaatgtctgtttgaattgaaacagagattgttgtaagaaggaaatgtcaaatgtgtcaatacaataaaatgttttcacatgtatatgtggaaaaaggcgtggccgagcatccacgtacaaagcagattttagaaaagctgaataatacaacagtcatagaaattgaccattacaaggatgttttctgccgcaaaaagcagagtatttctgctcaaagcaatgccaaggcgctcattctggcagagaatacaagtggctgcatatatgaaggtgcaccggtgtgtcagagctttggaaatgagaatttctactattgctcatgcatgatgaactgcatatttgactgtgaatactgctatttaaagggcatgtatccgtctggtaatcttgtggtgtttgtaaatttggaggatatttttgcggagcttgaagcacttctggcgcaaaaaagcatatatctttgcgtatcatatgatgcagacctcgtggccatagagtcgcttaccggctttgtgagggaatggattgcttttacaaaaaagcatgagaatcttacaattgaaatccgcaccaagagtggcaggtgtgatttgtggagcaattacgaagtctgtgacagggtaattattgcctatacagtttcgcctcaaagggttgcagcagagtatgagcattttgcgtctgcacctatggagcggattcaggcagcaaaatgtgctatgggtagtggatttccagtgcgactgtgctttgatccgatgatatactgcaaggactggagaggggaatacagcaggctggttgatgacgtattttcacagatagacggttctaagctgtgggatgtgagtatcggaagctttcgcatatcgcaggattatctgaagaaaatgcgaaaggacatgccttgtagtgctgtggtgaattttccatacaacaatgtgaatgggtattaccagtatccggaaaacatacgaagtgatatggaagagtttatgatacaggctgtatccgaatatgtggataaggacaggatatttatgtggaagtgatattattgcaatacattttcaatatatacacatagtataaaggagcaatcagatgaacaaagcaattgtaaccggggcgtcttccggcatcggaaaagctatatgcaggcagcttgcagcgaatggctggttggtttacggaataggaagaagcttcgatcaaagtgatgatattgcagggatagagcgtatagtatgcgatattaccgatactgcaaagctcatcaagacaataaaagaaattaataaaaatcatgacatatcacttctcataaacaatgcaggcgtcggcttttacgctcttcatgaggaacttaatcctgtaaaaatatcacagatggtgaggacaaatcttgaggcaccgatgattatcacaaatctgctgcttcgcgatttaaagaaaaacaaaggaacaataataaatatctcatcaatcactgctgaaaagacgaatccgcacggctgtgcctatggtgccacaaaggcagggcttacgagcttttcccacagcctgtttgaggaggcgagaaagtacggtgtgcgtgtggtaaatttagagcctgatatgaccgataccaatctgtacaggaatgctgattttacagtggatgaaaatgaagctgcaagaatacagccaaatgaggttgcagacgcagtgctttatgttttggggcaaagagaaggccttgtgatgacagatatcaccataaggccacagcttcacagaattgcaagaaagtaaagtgtttatattttaaaaagcatcaaatgccattcgaacgattgacttatagtcattaagcgtctggcattttttaattttcttccagagcttttcagagtcagaaaacagcccatgcatatatgcccagatttccttcatgcggaaaatggcatccttttcaccggaaaagatggacagataaccggataaaatctcatcatgccagttctttaagcgctcgcgaagctcggctttatccatgcttatacccttaagctctgcgataagagcaggatttgcaaacagtccgcggcctatcatgatttcatcaatatcagggaagcagtcggttagggcattaaaactattagtatcagtgatatctccgttgtagcagagtgttgttttatcaggatttattttctgcatggcgagggcgaagtcatccatgcgcggcgtatttttataaaaatccttctggactctcggatgcacggtaagctcacttatcggatatttactgtatatttcgataagcttgggccatagctcatcatcgttaaagcccacgcgggtttttattgaaacaggaaaatcagcttttgtatacagctcatcgaggaagctatccagcatatcaggatatgcgagtatgccggagcctcgtttcttggatacgacggtgcctgacggacagccgagatttacatttatctcatcatatccgtaaggaacaagctgcctgtgcaggtcgatgacctcgtctgccactatagacatggcctgcggtattagagtgattccgtcgttgtttaccgggtctatgtctctttttatcttggcattcatgcgctttgcggcagggatgaatggtgtgtagtatttgtctatgtagtcaaaattgtggtggaatgcgtttcttactgtatatccggtcagcccttgcatcggtgcgagaaaaaatttcat

SEQ ID NO: 63 - DNA, 7710 bp, unidentified
  source 1..7710: mol_type = unassigned DNA
atgaacaaattgaaccataccaacacaatcaaaaatgaccgttttccatcttccctgtttttggtgtattttctcgtattgctgttaatgtctggtattcatacaggaattatcgtaggtatgaatgcactggggtggaacaaaatcatacaggtaattttaccgcttggttattggactgttgtggcagttggattgacattttttacgaaaaatgtgatccggaaaagctatgaaaagccaatgcatgacctggcagatgcaactaaaaaagtggcagagggcgatttttcagtgtatgttccaacacttcacaccgctgaccggctggattatctggatgtcatgatcattgattttaataaaatggtggaggaactcggcagcattgagacgttgaaaacagactttttctccaatgtttcccatgagatcaagacgccgcttgcaattatccagaacaatgcggagctgctctgtatggaaaagacgccggagaaacaaaaagaatatgccgaagtgatctttcagactacaaagcgtctgtcggaacttatcagtaatattttaaaactgaacaagcttgaaaaacaggcgatcacgccggtagcagaagagtacgacctgtgtggacagcttgcggaatgtgccgtgaattatgagccggtgtgggagaaaaaagatattggatttgatgcagatatggaagattctataaagatcacggcagacgctgcgttgatggagatagtctggaataaccttttttccaatgcagtgaagttcacagaaccgggaggaacgataaagctgaccgagcagtcggatgattctgagatccgtgtgtcggtggaggataacggctgcggaatgacggaagagacaaggaaacatatttttgaaaaattttatcagggggatacgtcccacgcaatggctggaaatggacttggactggcactttccctgcgtgttttgcagttaaatgattataaaatcgaagtggaaagcgaaccgggacgcggcagtaagtttacggtgatcattccgaaaaggtagaatattggataacagacagaaagcgaatttctgggaaagcgtagaaaaatgagtgagtttgagagttttgattatacgaaagtgacggttgccgagaatcagatgtcacagtatatggatggctacgagcattttggatggaaggtggattccaatgtacccatagaaaaaggaatgggaaaagtaacaatccatttaaagcggagcagggcagttttaaataaaatggaactgacacggttacagagacatttcgaggcgtgcatgagtgagattgcggcgctcgaaaattccacagaatcttttgcaatgatcgcggcactgaccagtgggatttcaggctgcgcatttatagctggttcagtgttcgctgtgacggctgcaaaaccgatcatctggctgatgattttgctcgcaatcccgggattttttctgtggggaatcgcatatccgctttataaaaatgtgaaaaagtggagagaagagaaagtgaagcctctcattgaggcaaagcttgatgaggcggaaaaagtgtgcgagaaagggcatgcgctgttatagctgtaaagcatctgacggaaaaatacggtggcacgcttgtggcaagccaggagaaatacattttaataattccgaaacaaaacagaagcaattcgcaaacaaaacctctctatgatacagacaacaaatgaaacacagatcattacaaaaaaagagaggaaacataaaatgagcgaaacattatatttagtaacaggagcagcaggatttttaggaagtcatgtatgtcatcagttgttggagcgtggagaaaaagtaagagcatttgttcttgatggtgatccggcaatcaaatatattccaaaagaggcagagattgtaaagggagatctctgtgatatcgattcactcgaaaactttttcaaagcaccggagggcacagagacgatcgtgctccatgtggcaagcatggtcagtgtcaatcctgattttaaccagaaacttgtggaagtgaatgtgggtggaaccaaaaatatcatccagaaatgtttagagcacaaagagtgcaaaaaccttgtctacgtaagttctaccggagcgattccggaaattccaaagggacagaagatcaaagaggtaaatgagtttgatgcagagaaagtcgtgggctggtacagcaagaccaaggcgatggcaacacaggctgttttggatgcagtgaaaaaggaaggattaaacgcatgcgtcgtacacccgagtggtattttaggaccacaggactatgcagtgggggagactacaggaaccattattaaaatcatcaatggcgaaatgccgatcggcatgggcggaagttttaacctctgtgacgtgcgtgaccttgcagcgggctgtatcgcagcagccgataaaggacgaaaaggcgaatgttacattcttggaaatgaggaagtaacgttaaagaaaatgtgtgaactgttagacaaagatcttcactgtggtacctgtaaattttatctgccgctcggattggcaaaactgctcgcaaagcagatggagagaaaggcagcgaaaaccggtgcgaaagcattgatgacgacattttctgtctacaatctggaacgcaataatgcatttgactattccaaggcagaaaaggaactgggctatcatacaagaagctatgcggagacattgcatgatgaggcagtgtggcttagagcagaaggaaaaattgcataaaaggcagtggaaaggaaaaaagtttataacggagatttttgtgatatgaaaaaagtatgtgttgtaaccggaggcggctccggaatcggttttgcagctgcaaaagaggcagcaaaaaaagggtactatgtaatgatagttggacgaaatgaaaaaaaacttgcaggtgcagtagaagaattgagaaaagacggatgcgaagcagaagcgtatagctgtgacgtttcagacagggaacactgctttgcattggcaaggcatgcggcagaatgtggggcagtaaaggccgtgttgcatattgccggaatgagtccgcatatgggagatgcggagaaaatcatgcaggcaaacgcacttggaaccgtcaatatcaacgatgcattttttgaagtgatcgcagagggcggctgtgtgatcgacacaagttccacttctgcttacatggcaccgtcgtttattatgccaaaaagggtttatccgcttgcatgtacagaccggaagctttttatggataaaatgatgaaaaaagtaaaaatgtttccacggaaaacaagagagggtgtcgcctacagtatgagtaagcattttactatctggtttgcaaagcaggatgcagcacgttttgccagaaagaatgcccgggtgttaagtattacgccaggaaactttgagacaccgctcggaaatctcgaaaaagaggaagcgtccacctatctgaaatttgcggcaatcaagagaaatggacgtccggaggagattgcaccgctttatgttgcactgatcgatgagaggttgagttatctgaccggcacagacattctctgcgatggaggctgtatcgcaggcggagccagtgcctttgcgagataaaagtcatagtaattagccaatcaaattgaatcaattgtatttttataaagaatccgctatactgaaacagatttagtatagtggattttttgtattggggagaacattttgattacagtagcaatcgtagaggatgaagcggcagtcacaaggaagctgacgaatatggcgcagtatgcagtatttgcaaatgcaaatggtgcaagcagttttcttgtgataaaataatatagataaattggggggataaatgtgcagatacattattttcaaagatatcattcgaaggagaatgtagatacatctaatactatgctgatgttatctcgcttatataattataatgcggataaattctttgtaatgttgaatgctctaatactgggacaagatgagacacctgaaataacatttgagcttcaggtagcaggagacgaaagtgttccagatgcgattataagccagaaaagttttaaaatagtagttgagacaaaattacataatcaatttcagcaggatcagcttgaaaaacatctgactcagtttggaacagaggagataaaggtgcttttaacgttagatccaaaacctatgaaagaatcattgatggatagttttggcattgtgctgaaaaagtataatgcagataggattaatgaaataaaaacaccaataaggcatgtaaatattacatttgaacaattagttgctgcaatggaagatattgtagatgagcgggattcagagatcatggctgtgcttgatgattataagaagtattgttttgatgaaaaactgatacctgatgatggaaattggatgagagcaattgttgcgggaacaacacttgaagataatttgaaatatgatttttattatgatcaggcttcaagaggctattcgggtcatggatacattggcttatataaaggaaagagcattagagcgatcggaaaattaaaaaagacaattgttgcagagttagtaaatggagaagtgtcatatattaatgaaagcggagaagctgctacaaaagaggagatagaaaagattaaagaggctattgttcatgcagagacagaatatggatacaatttaaaaaccatcaaacatagatattttatagttgagcatttttatccaacagactttaaaaaagcaagtaaaaatccgattcaaaaaagtaaatattttaatctggcagaaatgttcaaaagtaaaacgttgcctaaaactgatgaaatagcatcaatactggatggaaaaacatgggaagagtttcattaaacagtggattttcataaatatgaagaaaataatgttactgtaatagtgttcatatagaggtgtgtattatgggaaacgaatcaggtgaatggattatgcatggcatgaagtgggacaacccggattgcattcattctgtagatgaagcaatcaagtatataaatgaacttggctttttaccattatttaagaatgaaatagatgggttttcacttgaagaaagaactgttccagagtactggtggagtgatgatccagagattgatccatggatgtggcgggctattatagcaaggcggcatgatatcgtctatggaaagttctttgataagaaggcaggatttatatcaaaaaaatggcttcctgtatttgctaattaccgccgggatggatatgattttgatgcattatatgatgatgggaaagcacctaataagcataaaaagataatggtcaattttatggaaaacaatgctgattcagagatttattccaatgaattgaaaaaacaagctggatttggtaaggatggagaaaagggatttgatggtgctataacgaatcttatgatgcagacctatctgtgcaactgcgattttaagaagagagtgaataagagaggtattgaatatggatgggatgttgcagtgtattcatctattgagcatatcaatggatacgattatgtgacttcctgttataaggataatccgcaggattcatggaaacagctggtagactatatgcatgagatgtatccgaaggcgacggataagcagataagaaaagtgttaaaataaaacaatgcatttttgaggtgaatatacataaaatgaattcaaaaaaatccgcagattattgcaagctgatagaaaatgtaaaaaacaaatatcgaaaaaatcctatatatgctaagaacctgacacttggttggtgcgatttgcgtcgtggagaagatttgtgtcaggaaattaacttatggacatattggcaagggagagattacgctaagaacacaccacatattaaatatatgctgataggtcaggatttcggaccgcctgaaaaggaagagataaagggtacgattgcaaatgtccgtaagatgaatgatggtatagatgtgatgtttcatgaaaatgtagatttggaagcaagggattcacagacggataaaaatattgtcggatactttgaactgcttggtaaaaatgaaattgacaagaaaaaatatccagatttgtttttctgcaattgtaatttgggctatcgcagagataagtattctggaaatatgaccagaaagatattggcaaatgatgcagctgaaataaaatcattgattgacattatagagccggaaaacataatctgtctggggcttgatacatctgtggttgtaatacgaactctgattgataaaaagttttcctgtaatagagtatctgaacttataggaactggcgaaccttatatttatggagaaacatatatataccctgtagcacatccggggtattggggtacaggtacaagaggggaggataatgttattgaagattggaggagaattagaaaatagggaggtgccacaatgccatttaagatagttcgcaacgatataacaaaagttaaagctgatgcgattgtaaatactgccaatccaaatccaatatgtgcaagtggcacggatttagcaatatatgaggcagcaggaaaagaaaaacttctcgccgaaagagcaggtatcggtaagattgcaagaggtgatattgattcttacatagatgctaattatgtcagggaaagtcatagaaaagaatatccggtgcgaagcagaagcaacgcccgcatgagaggattgacagaggaacgagaataaagatccatacaatatattagttgagaacaatcgagtatataaacttggaggatgggaatttcttgatatagccaataagctttttgacaatgaaaagcaggtggactggggaagctatgcatatcagtgcacaaaggagcaactggaaaaactgatggaacagactggatgtgaaatagataagatgaatgaactggcatctgagaaaatctatggtattgtgtttgttgaagaggtgtaaatcttttagagaccggagaaattctggtctctttatttcgattaccactgtcaaataaagccaaaatggtttatactttttatcaagtgaaagaagaaagcattaaaagtagatttgatggcaaaattataaaaggaatgatggatatactatcagggtaacaaaagaagaattttatgctggtggcaatagtgatccacgaaatccgaatatcttaaaaatgtttggttttgtaaatgttggtgagcgtgccggaagtggtgtcgataagattatgactgcatgggcagaacaaaactggaaaaaaccggaatttgatttctcagagcgcagtgacagggtaacattaaagctcgaagttggacaagtgatatatattccgggagttgctgatataagaaacacaactgagagtgatgaagcagagacaataacaactatgtcgaaagttgacaaagtacttgcttatatccggcaaaatggaagtgtttcaatgcaaaaagtaatggaaacctgtaactacagatctagaactggagcaagaaagttaatagataaaatgataaatgcggattttatagaaaaaactggagaaggaaacaaaacgatatataaaattaaagaatag

SEQ ID NO: 64 - DNA, 9667 bp, unidentified
  source 1..9667: mol_type = unassigned DNA
atgtgtggaattattggatttacaggtaaattaaaagcccaggatgtcttattgacaggacttgcaagccttgagtaccgtggatatgacagtgcgggaattgcgtactttaaagataccggaaaaatttcacttcggaaaactgtcggaaaagtaaaagatcttcgtgcaatctgcgatgatgataacaattctacgtgtggaatcggccacacccgctgggcaacccatggtggcgttaccaatgccaatgcacaccctcataaggtcggacaggttgcattgatccacaatggtatcatcgagaactatcatgatctcgccaccaaatacgatctgacggatgaactgatttccgagacggataccgaagttgccgccgcattgatcaataaactctacgaaggagatccaaaagaagctctgcgcaaagcagtagccgaaattgaaggttcctttgccttctgcgttctgttcaaggatcatcctggtgaaatttatgcggtaagaaatgtcagccctatggttgcaacatactgtgatgacggtgcttttattgcatccgatctgactgcttttatcgcatacaacaagcgttatttcatcgtgccggaatatcatattttaactatgactgcggacggcattacgttagaagatttagacggtcattccgtagaaccggaatatatggaagtaaactgggatgttaccgcagcccagaaagatggttatccgcatttcatgatcaaagaaattcatgaacagccggctgccatcacaagaaccattaccccacgtatcaaagatatgcttccggatttttcggaagatgccattgcggattccttctttgaaaatgtaagcgacattacaatcgttgcctgtggtactgcaatgtacgcgggaatggtaggaaaaaccatgatccagaaccgcctgcatattccggttaccgtggcaatcgcatcggagttccgctatgaagaaccggtaatcaatgaaaaatccatggtgatcgttgtatcccagtctggagaaaccattgatactttggaagctcttcgccttgcaaataaatatacaaagaaaacactgtctattgtaaatgtaaaaggctccagcattgcacgtgaaagcagctatgtattatatacacatgccggtccggaaatcgctgttgcaagtacaaaagcatacaccgttcaggttgcttctttttacctgcttgcatgcaaacttgccatgacacagcaaaagatttctgtcgaagaggcacgtacatttgttggaacactgcaggaaattccaaattacatcgaggaagttcttgcacaggctcctgatattgaacagctgaccaaacgcatgatcaatgccaacaacgcgttctttatcggtcgtggactcgattataccctttgcatggaaggtgctttgaaattaaaggaaatttcttatattcatgccgaagcctatgctgccggtgaattaaaacacggaaccattgccctggtctgtgaaggggttcctgtcattgccgctgctacccagaaacatgtatacagcaaagttatttccaatatccgggaagtaaaagcccgtggtgcttatgtcattcttttgtccaaagacaaagaaatcacagatccttctatctgtgatgtacacatcaatcttccggatgtatccgacgaatttacgatttttgaatctgttgtaattttccagctgattgcatattacacatccgttggaaaaggcttaaatccggatcagccacgtaacctggcaaaatctgtaacggtagaataaaaaaaactgtcgcgcgaaaattcgtgcgacagtttttttgacatagagcctttctaaaatttttgaaggcaaaaaaagaaccccagaagctctctaaaagcctctgaggttgcccctgccaaggattctctcacccatgtaccggaatccttgtatcgtcggcgcgacaggatttgaacctgcgacctctgcgtcccgaacgcagcgctctaccaagctgagccacgcgccgtttcaactgcccaattatagtaacacattctccggtgtttgtctagtgaatttttttaatttatggtacaatataaaaaaagaacggagaagaacaatgaaacatactgctttgattacaggtgcatcccgtggaatcggtgcagccctggcatgtcgatttgccgctgaaggctatcatctggctctttgctgccataactcttatgaaacgctgcaggcacttgccacaaaacttgaaacaacctactccatacaggtgctttgcttccgtggtgatgtaggagactatacttttatctgtgacatggtgcaaaaaacactggataccttcggccagattgatgtgttaatcaacaatgccggcatctcttatatcggtctgctcaccgacatggatattaccgactggaaccggatagttgcgacaaacctcacatccgtcttttccacctgcagacaggtcatcccttccatggttcatgccaaatccggacatatcatcaatatttcttctgtatggggaaatgtcggagcttcctgcgaagttgcctattctgcatgcaaaggcgggatcaattcccttacacgcgctttgggcaaagaacttgcccctagcaatatccaggtaaatgccatcgcctgtggggtaatcgatacggatatgaaccgttgtttctccgaggaagaacgctctgcactcatcgaagaaattcctgcaggccggatgggatccccggaagaagttgcttcactggcatattctcttgccacagcaagcagttacctgaatggacagattctcaccttagacggcggatggatttaatttcttatctttttggaaatctttttccatttatttaagaattaaaacgcaatacgcgttttctctgttttttatatcaactttctataaaatcatttgtatgaaaacgaatgataaaaataaatacaaagattttggtgaccgtctgagtctgattatgtataaacaaaatatttccaatatccagctggcaaatgcaatgtttgtttcgccgtccacgatcagcggataccgtactggtcgtcgttctccgaccgttgcggatcttgcagccatcgtgcagattctgaatgtttctgcagattacctcatcggaaccagtgaaattacaaccagacccgataccaccgaaaaaaagagttgagcacgccctgtttccagagcggtgctcaactcttttttataaatcatgttctgccagtaaaattaccgtagaacgttccggaacacgcacacgtgtctgatctccctgtgtctgggcttcaaaatctgccccatcctggtattcacagaaagtatttactacaagtttccaatgataagactccggcaacgaaggcaggcgcatctccaaaggctcccaatacgcattcattccgtaaaagatcatatcatcatccgtatcatcggcatttcttcccgcatacatgattccaattaaatgtgtattatagtccgtataattccggttcggctctccgttatggatacttacggaaggtaacccgcagactgccggctttgtatcccttcgcagaatcggatgctttgcacggaaatggatcataaaacgggcaaaatcatgaatctcctgaaattcttccagtctgttccagtccagccaggaaataatattatcctggcagtatgcgttgttatttccatactgcgtattacaaaattcatcccctgcaaaaaacatagccggtccacggctgcataacaacgcggcaaatgcattcttcacaagcctgcgccgcaggctcataaccgccggatcatccgtctcaccttccaccccgcagttccagctcatgccgttgttatccccgtccgtattgttccatccgtttttctcattatgcttttcattatatgaatacagatcatacaacgtgaacccatcatgacaggtcagaaaattgacggatgcactatatccgcggcttgccggatcatacatgtcggaggatccggtgatacgtgtaattgcacgccctgctacgccactgtcgccctttaaaaagcttctcatatcatcacggtatcttccgttccattcggcccagcggttccaggacgggaaacttccaacctgatacaagccacccgcatcccaggcttctgcgatcaacttcatatcccccagaatagagtcaaatgcaagggcttccagaatcggcggattctccatcggtgcaccattctgatctcttcccagaatcgatgccagatcaaaccggaatccatccacccggtactctactgcccagtgccgcagacagtccgtaataaacctccgtaccaccggatggttgcagtttaagacattgccacagccgctgaaattgtaataatatccatccggtgtaagcatataataaatattgttatcaatccccttaaagcaaaaacatggaccgttttcatttccctctgccgtatggttgaataccacatcaagaatgacttcaattccattttctttcagttcgcggatcagacgctttaattcatcaccctcatgattatgctcctgatgaaatgcataacttgtattcggggcaaaaaaggaaaccgtattatagccccagtaattgtacaactgcacgccatccaccacacgggcactttccatttcatcaaattcaaaaatcggcatgagttctaccgcattgattcccagatctttcagatacggaattttctgtcgcaaaccttcaaatgttcccccaccttttacaccggaggacgcatctttggtaaatcccctgacatgcatctcatagatcaccagatcttcaaatttgtaattcagattccgataccgcccccagtcaaaatcactttgcaccacacgggctttatagacaaaatcctttccgccttccggtttttctccccagtttctctgaccggtaacagctttcgcatatggatcaagaagcgtatgttttctgttaaacagtaaccctctcgcctgatcggcaggaccgtccatctgataggcatactcaaaatcctctgcttttaagccaaaaacaaggatagaatacgtatttccaattttataactttccggaatgcggattcttgcatacggttcctgtgccgccggccggaataacagcaggacacaactcgtggcaccatgggagcttaccgtaaaacttaccccttcctctgtctgatatgcaccattcatctgataaaatcccggacgtacatcaaatccaccgatattatcgagtggatgaatgacttccccgagactttccatttcttcgtctatcggccagcttttctgttttgacggataattccaaaaacttgcattcatgtgctgattcctcttatcattattatttacttgccacataaaattatagtatccccctactcttccctgatgattaccctgccatttgcgtcaaatccgattttactgtacttttccgaatactcattcatatgatcaataatcgtctgttttctgtcgccttttgctatggcaggctgaaaattatttctttctgatgtggaagaaatgctgcatggtatcatatcggctgatatatctgtctgcagtaccccatccacaaaggtaaaggtctgttcatagatcgccgtatctttgtcttttggattcctgttccccccaaagcagaaatttccaagactgtagcagatcatttttccgttgtataattccattccctgcaatacatgaggatgtgtaccgaccagcagatctgctccccagtcaatcacctggtgtgccagcttctgctgataatcattcggataatgatccccctctatcccccagtggcaacaggcaattaccagatccgctccttcttcccgaagttttgcaatcccatcccggatataattggcatgtttttcatcagcggacagctggcttgcggagacaattccgattttgataccatccttcgtggtataggtatccacatgatcattgaatccgaagataatccctgctttatttaacacttccctggtatcatcaagtccctgctgcccataatcaaacgtatgattatttcccagacttgccccctccacagaactgtctgtcataataccaacatactccggttttccttttaagttccacgttttttccacacgctcggtcgcatttgacaacacacattccagattgatcagtgtaaaatcatcctgctcaaaaatacttctgatatttttaaaaaaataatcctgcccgtatttatcatagtattcatgaaaggaacctgcatacccatgcgtctgtgttgccccaagcgtacagtcacctgtcgccgtaatttttaccgtctgtatcaccggttcctgctgcgtttcagttgcagtcccggtttccgtttcttccagcgtacccggttcttccgtcatctgtgtctccgtgattttttccgtagaagagggcaaagccgatgacgttgctgcaggagaagaacatcccgtcagcaaaaatcctgccattaggattggcaatatccattttttcatacgttttcagactcctctttcacaagaatatccaccgtgtgaccgcttgcacccataagatccatccgttcacaggttgccagatgatactgcagaaacgcatcaaactcttcttccgtcagcgcatttaaaaacggacgcatataatttgctgcaccgtctgccgctatgatctgccggcgcctgacctctacctgccggtccaatgcttcaatatcttccagacgaaccatggaatacagaggattggcttttgaagtacagtgataatcctctgtgagcattccctcctgaagcgcctccagaatatgtttttccttaaacgcatacgtgataacggaaaattcattcataatatacgccacgagaatcctgcctccgggtctggtcaccctcaccgcctcccgcagcgcagcaagcttgtccttttcctcatgcaggtgatacatcggcccaaacaacagggttacgtcaaaggaatcatcggaaaattttttcagattcattgcatttccctgatatgcatgcactcctgcacccttctgtttcaggcgtcccagattatgctttaccagttccacggccgtcacatcgaacccttcctgtgccagcggtacgctgtatcgtccggttcccgccccgatatcaaggatatggatttcctcttttgcacgttctttcacaatttcatccagacactgatggatataatgcatgcttgtcacaaattccaccctgccgtgtcggctgtccagacgcttctcttcattaaatttattataataggcttctaagtctgtcatattttaatactaacacattttctttaaaatttcactcacaatcgctgatgcgacatccgctttgctcattatttccagttccctgcagtcatctgccgtaatcagcgtcaccacattggtatctgtaccaaatccggctccggctaccttcaggttattcgccacaatcatatctgcattcttttttgcaagttttgcacgggaattctccagcatatgttccgtctccatggaaaatccacacagaaactgtcccggttttttgtgcgcgcccagatacgaaaggatatcttccgtgcgttccatcgtaagagtggcatccccgtcttttttcttgactttttcatcgaccgggtgatccggacgataatccgccacagctgccgctttgataataatatcctgttgctctgctgtctcctttacggctgctgccatatccgcggcagatacaaccggaacgacctttacaaacggcggcggagtgattgccaccggtcccgtgatcagcgtcacttccgcgccacggcgcatacagttttccgcaattgcatagcccatttttccggtagagtgattcgtaatataacgcaccggatcaatcttctcctgtgtcggtcctgctgtgaccatcactttctttccgaccatgtccttttcgcaggcaagatctttcataatataagaaaacagtgtttccggttccggcattttcccggctccggtatccccgcaggcaagataaccactcgccggatcaatgatatgaaacccataatgctccagctttttgatgttatcctgtacgatcggattttcaaacatattggtattcatggcaggggaaacatacttcgggcattttgccgcaagaatcgttgttgtcagcatatcatctgcgattccgtttgccatcttgccgatcacattagcagaagccggtgctaccataaaaatatctgcacgctttgccagtgccacatgctcgacattgaactggaaattccggtcaaacgtatcgaccagacacttgttgcttgtgagcgtctcaaacgtgataggattaataaaattggttgcattttccgtcatgatcacatgcacatccgcatgctgcttgacgagcgcacttgccagataggcgattttataggcagcgatacttccggtcacaccgagtaccacacattttccttttaacattgtctcttactcctttgcagaaaaatcatatcttctgctattttatcacactttttccctaaaacaattgaatttttgtcatctgttccagtatggaatctttgacagaatcgttcagatatgctggatttaattttctttttgcatatgcaaggtaagaaccatttgtctcttcaatcaaaactgccgtaaaaaaccgctcccagctaaaatatgttttgctttccacatattcccacggcttttccagcacctgatctgcccatttgctttttactacttttgcctttaatatcagccattcaaatgactccggcaaataaagcaccacttgatcttttccaccaatcaactgcatcactctgtcaatttcagaaccaaatgccgcgccgtctgcaattacaagtatgcgttcatttttatgcatatttaaataatggaaaacatttgactttccattcattgtctcacatttcaattgctgttgcctacatacagaattaaaaaactgataaccggaattactgtcttccgttattacaacctctggtttgatatccttctctaaagtctgtgctccatatattctgtaaaactcatgataacacggttttaatgttccgtattttcctgaagtacgaattccatagatttcctccacgctatacggcaaagaaggcaaggattccctggaaacaatgacataataattatctgttttctgaatagtatctgcgaattctactgtcttgataaattcgtttccctcatcaataaatacaatactatcctgcattgctgataactgttctttccacagtgagccttcgagcacataacattttttgtcacacgtcagttccacaggggtcccggatggattgtttacgtattcccgaatcatatctaccaatgtggtttttccagttgcgctgtctccccggatgaccgtcagatttcttcgaatttcaaaatcatattttaagcgctttgttgatacaataattctatgttttcccttcat

SEQ ID NO: 65 - DNA, 9665 bp, unidentified
  source 1..9665: mol_type = unassigned DNA
atgtgtggaattattggatttacaggtaaattaaaagcccaggatgtcttattgacaggacttgcaagccttgagtaccgtggatatgacagtgcgggaattgcgtactttaaagataccggaaaaatttcacttcggaaaactgtcggaaaagtaaaagatcttcgtgccatctgcgatgatgataacaattctacgtgtggaatcggccacacccgctgggcaacccatggtggcgttaccaatgccaatgcacaccctcataaggtcggacaggttgcattgatccacaatggtatcatcgagaactatcatgatctcgccaccaaatacgatctgacggatgaactgatttccgagacggataccgaagttgccgccgcattgatcaataaactctacgaaggagatccaaaagaagctctgcgcaaagcagtagccgaaattgaaggttcctttgccttctgcgttctgttcaaggatcatccgggtgaaatttatgcggtaagaaatgtcagccctatggttgcaacatactgtgatgacggtgcttttattgcatctgacctgactgcttttatcgcatacaacaagcgttatttcatcgtgccggaatatcatattttaactatgactgcggacggcattacgttagaagatttagacggtcattccgtagaaccggaatatatggaagtaaactgggatgttaccgcagcccagaaagatggttatccgcatttcatgatcaaagaaattcatgaacagccggctgccatcacaagaaccattaccccacgtatcaaagatatgcttccggatttttcggaagatgccattgcggattccttctttgaaaatgtaagcgacattacgatcgttgcctgtggtactgcaatgtacgcgggaatggtaggaaaaacaatgatccagaaccgcctgcatattccggttaccgtggcaatcgcatcggagttccgctatgaagaacctgtaatcaatgaaaaatccatggtgatcgtcgtatcccagtccggagaaaccattgatactttggaagctcttcgccttgcaaataaatatacaaagaaaacactgtctattgtaaatgtaaaaggctccagcattgcacgtgaaagcagctatgtattatatacacatgccggtccggaaatcgctgttgcaagtacaaaagcatacaccgttcaggttgcttctttttacctgcttgcatgcaaacttgccatgaaacagcaaaagatttctgtcgaagaagcacgtacatttattggaacactgcaggaaattccaaattacatcgaggaagttcttgcacaggctcctgatattgaacagctgaccaaacgcatgatcaatgccaacaacgcgttctttatcggtcgtggactcgattataccctttgcatggaaggtgctttgaaattaaaggaaatttcttatattcatgccgaagcctatgctgccggtgaattaaaacacggaaccattgccctggtcagtgaaggggttcctgtcattgccgctgctacccagaaacatgtatacagcaaagttatttccaatatccgggaagtaaaagcccgtggtgcttatgtcattcttttgtccaaagacaaagaaatcacagatccttctatctgtgatgtacacatcaatcttccggatgtatccgacgaatttacgatttttgaatctgttgtaattttccagctgattgcatattacacatccgttggaaaaggcttaaatccggatcagccacgtaacctggcaaaatctgtaacggtagaataaaaaaaactgtcgcgcgaaaattcgtgcgacagtttttttgacatagagcctttctaaaacttttgaaggcaaaaaaagaaccccagaagctctctaaaagcctctgaggttgcccctgccaaggattctctcacccatgtaccggaatccttgtttcatcggcgcgacaggatttgaacctgcgacctctgcgtcccgaacgcagcgctctaccaagctgagccacgcgccgtttcaactgcccaattatagtaacacattctccggtgtttgtctagtgaatttttttaatttatggtacaatacaaaaaaagaacggagaagaacaatgaaacatactgctttaattacaggtgcatcccgtggaatcggtgcagccctggcatgtcgatttgccgctgaaggctatcatctggctctttgctgccataactcttatgaaacgctgcaggcacttgccacaaaacttgaaacaacctactccatacaggtgctttgcttccgtggtgatgtaggagactatacttttatctgtgacatggtgcaaaaaacactggataccttcggccagattgatgtgttaatcaacaatgccggcatctcttatatcggtctgctcaccgacatggatattaccgactggaaccggattattgcgacaaacctcacatccgtcttttccacctgcagacaggtcatcccctccatggttcatgccaaatccggacatatcatcaatatttcttctgtatggggaaatgtcggagcttcctgcgaagttgcctattctgcatgcaaaggcgggatcaattcccttacacgcgctttgggcaaagaacttgcccctagcaatatccaggtaaatgccatcgcctgtggggtaatcgatacggatatgaaccgttgtttctccgaggaagaacgctctgcactcatcgaagaaattcctgccggccgtatgggatccccggaagaagttgcttcactggcatattctcttgccacagcaagcagttacctgaatggacagattctcaccttagacggtggatggatttaatttcttatctctttggaaatctttttccatttatttaagaattaaaacgcaatacgcgttttctctgttttttatatcaactttctataaaatcatttgtatgaaaacgaatgataaaaataaatacaaagattttggtgaccgtctgagtctgattatgtataaacaaaatatttccaatatccagctggcaaatgcaatgtttgtttcgccgtccacgatcagcggataccgtaccggtcgtcgttctccgaccgttgcggatcttgcagccatcgtgcagattctgaatgtttctgcagattacctcatcggaaccagtgaaattacaaccagacccgataccaccgaaaaaaagagttgagcacgccctgtttccagagcggtgctcaactcttttttataaatcatgttctgccagtaaaattaccgtagaacgttccggaacacgcacacgtgtctgatctccctgtgtctgggcttcaaaatctgccccatcctggtattcacagaaagtatttactacaagtttccaatgataagactccggcaacgaaggcaggcgcatctccaaaggctcccaatacgcattcattccgtaaaagatcatatcatcatccgtatcatcggcatttcttcccgcatacatgattccaattaaatgtgtattatagtccgtataattccggttcggctctccgttatggatacttacggaaggtaacccgcagactgccggctttgtatcccttcgcagaatcggatgctttgcacggaaatggatcataaaacgggcaaaatcatgaatctcctgaaattcttccagtctgttccagtccagccaggaaataatattatcctggcagtatgcgttgttatttccatactgcgtattacaaaattcatcccctgcaaaaaacatagccggtccacggctgcataacaacgcggcaaatgcattcttcacgagtctgcgtcgcaggctcataaccgccggatcatccgtctcaccttccaccccgcagttccagctcaggccgttgttatccccgtccgtattgttccatccgtttttctcattatgcttttcattatatgaatacagatcatacaacgtgaacccatcatgacaggtcagaaaattgacggatgcactatatccgcggcttgccggatcatacatgtcggaggatccggtgatacgtgtaattgcacgccctgcgacgccactgtcgccctttaaaaagcttctcatatcatcacggtatcttccgttccattcggcccagcggttccatgacggaaaacttccaacctgatacaagccacccgcatcccaggcttctgcgatcagcttcatatcccccagaatagagtcaaatgcaagggcttccagaatcggcggattctccatcggtgcaccattctgatctcttcccagaatcgatgccagatcaaaccggaatccatccacacggtactctactgcccagtgccgcagacaatccgtaataaacctccgaaccaccggatggttgcagtttaagacattgccacagccgctgaaattataataatatccatccggtgtaagcatataataaatattgttatcaatccccttaaagcaaaaacatggaccgtcttcatttccctctgccgtatggttgaataccacatcaagaatgacttcaattccattttctttcagttcgcggatcagacgctttaattcatcaccctcatgattatgctcctgatgaaatgcataacttgtattcggggcaaaaaaggaaaccgtattatagccccagtaattgtacaactgcacgccatccaccacacgggcactttccatttcatcaaattcaaaaatcggcatgagttctaccgcattgattcccagatctttcaaatacggaattttctgtcgcagaccttcaaatgttcccccaccttttacaccggaggacgcatctttggtaaatcccctgacatgcatctcatagatcaccagatcttcaaatttgtaattcagattccgataccgcccccagtcaaaatcactttgcaccacacgggctttatagacaaaatcctttccgccttccggtttttctccccagtttctctgaccggtaacagctttcgcatatggatcaagaagcgtatgttttctgttaaacagtaaccctctcgcctgatcggcaggaccgtccatctgataggcatactcaaaatcctctgcttttaagccaaaaacaaggatagaatacgtatttccaattttataactttccggaatgcggattcttgcatacggttcctgtgccgccggccggaataacagcaggacacagctcgtagctccatgggagcttacggtaaaacttaccccttcctctgtctgatatgcaccattcatctgataaaatcccggacgtacatcaaatccaccgatattatcgagtggatgaatgacttccccgagactttccatttcttcgtctatcggccagcttttctgttttgacggataattccaaaaacttgcattcatgtgctgattcctcttatcattattatttacttgccacataaaattatattatccccctactcttccctgatgattaccctgccatttgcgtcaaatccgattttactgtacttttccgaatactcattcatatgatcaataatcgtctgttttctgtcgccttttgctatggcaggctgaaaattatttctttctgatgtggaagaaatgctgcatggtatcatatcggctgatatatctgtctgcagtaccccatccacaaaggtaaaggtctgttcatagatcgccgtatctttgtcttttggattcctgttccccccaaagcagaaatttccaagactgtagcagatcatttttccgttgtataattccattccctgcaatacatgaggatgtgtaccgaccagcagatctgctccccagtcaatcacctggtgtgccagcttctgctgataatcattcggataatgatccccctctatcccccagtggcaacaggcaattaccagatccgctccttcttcccgaagttctgcaatcccatcccggatataattggcatgtgtttcatcagcggacagctggcttgcggagacaattccgattttgataccatccttcgtggtataggtatccacatgatcattgaatccgaagataatccctgctttatttaacacttctctggtatcatcaagtccctgctgcccataatcaaacgtatgattatttcccagacttgccccctccacagaactgtctgtcataataccaacatactccggttttccttttaagttccacgttttttccacacgctcggtcgcatttgacaacacacattccagattgatcagtgtaaaatcatcctgctcaaaaatacttctgatatttttaaaaaaataatcctgcccgtatttatcatagtattcatgaaaggaacctgcatacccatgcgtctgtgttgccccaagcgtacagtcacctgtcgccgtaatttttaccgtctgtatcaccggttcctgctgcgtttcagttgcagtcccggtttccgtttcttccagcgtacccggttcttccgtcatctgtgtctccgtgattttttccgtagaagagggcaaagccgatgacgttgctgcaggagaagaacatcccgtcagcaaaaatcctgccattaggattggcaatatccattttttcatacgttttcagactcctctttcacaagaatatccaccgtgtgaccgcttgcacccataagatccatccgttcacaggttgccagatgatactgcagaaacgcatcaaactcttcttccgtcagcgcatttaaaaacggacgcatataatttgctgcaccgtctgccgctatgatctgccggcgcctgacctctacctgccggtccaatgcttcaatatcttccagacgaaccatggaatacaaaggattggcttttgaagtacaatgataatccgctgtgagcattccctccttaagcgcctccagaatatgtttttccttaaacgcatacgtgataacggaaaattcattcataatatacgccacgagaatcctgcctccgggtctggtcaccctcaccgcctcccgcagcgcagcaagcttgtccttttcctcatgcagatgatacatcggcccaaacaacagggttacgtcaaaggaatcatcggaaaattttttcagattcattgcatttccctgatatgcatgcacgcctgcacccttctgtttcaggcgtcccagattatgctttaccagttccacggccgtcacatcgaacccttcctgtgccagcggtacgctgtatcgtccggttcccgccccgatatcaaggatatgaatttcctcttttgcacgttctttcacaatttcatccagacactgatggatataatgcatacttgtcacaaattccaccctgccgtgtcggctgtccagacgcttctcttcattaaatttattataataggcttctaagtctgtcatattttaatactaacacattttctttaaaatttcactcacaatcgctgatgcgacatccgctttgctcattatttccagttccctgcagtcatctgccgtaatcagcgtcaccacattggtatctgtaccaaatccggctccggctaccttcaggttattcgccacaatcatatctgcattcttttttgcaagttttgcacgggaattctccagcatatgttccgtctccatggaaaatccacacagaaactgtcccggttttttgtgcgcgcccagatacgaaaggatatcttccgtgcgttccatcgtaagagtggcatccccgtcttttttcttgactttctcatcgaccgggtgatccggacgataatccgccacagctgccgctttgataataatatcctgttgctctgcggtctcctttacggctgccatatccgcggcagatacaaccggaacgacctttacaaacggcggcggagtgattgccaccggtcccgtgatcagtgtcacttccgctccacggcgcatacagttttccgcaattgcatagcccatttttccggtagagtgattcgtaatataacgcaccggatcaatcttctcctgtgtcggtcctgctgtgaccattactttttttccgaccatatccttttcgcaggcaagatctttcataatataagaaaacagtgtttccggttccggcattttcccggctccggtatccccgcaggcaagataaccgctcgccggatcaatgatatgaaacccatagtccccgagctttttgatgttatcctgtacgatcggattttcaaacatattggtattcatggcaggggaaacatacttcgggcattttgccgcaagaatcgttgttgtcagcatatcatctgcgattccgtttgccatcttgccgatcacattggcagaagccggtgctaccataaaaatatccgcccgttttgccagtgccacatgctcgacattgaactggaaattccggtcaaacgtatcgaccagacacttgttgcttgtgagcgtctcaaacgtgataggattaataaaattggttgcattttccgtcatgatcacatgcacatccgcatgctgcttgacgagcgcacttgccagataggcgattttataggcagcgatacttccggtcacaccgagtaccacacattttccttttaacattgtctcttactcctttgcagaaaaaatcacatcttctgctattttatcacactttttccctaaaacaatttaatttttgtcatctgttccagtatggaatctttgacagaatcgttcagatatgctggatttaattttctttttgcatatgcaaggtaagaaccatttgtctcttcaatcaaaactgccgtaaaaaaccgctcccagctaaaatatgttttgctttccacatattcccacggcttttccagcacctgatctgcccatttgctttttactacttttgcctttaatatcagccattcaaatgactccggcaaataaagcaccacttgatcttttccacccatcaactgcatcactctgtcaatttcagaaccaaatgccgcaccgtctgcaattacaagtatgcgttcatttttatgcatatttaaataatggaaaacatttgactttccattcattgtctcacatttcaattgctgttgcctacatacagaattaaaaaactgataaccggaattactgtcttccgttattacaacctctggtttaatatccttctttaaagtctgtgctccatatattctgtaaaactcatgataacacggttttaatgttccgtattttcctgaagtacgaattccatagatttcctccacactatacggcaaagaaggcaaggattccctggaaacaatgacataataattatctgttttctgaatagtatctgcgaattctactgtcttgataaattcgtttccttcatcaataaatacaatactatcctgcattgctgataactgttctttccacagtgaaccttcgagcacataacattttttgtcacacgtcagttccacgggcgtaccggatggattatttacgtattcccgaatcatatctaccaatgtggttttgcctgtcgcactgtctccccggatgaccgtcagatttcttcgaatttcaaaatcatattttaagcgctttgttgatacaataattctatgttttcccttcat

SEQ ID NO: 66 - DNA, 14816 bp, unidentified
  source 1..14816: mol_type = unassigned DNA
ttatacaaccgtcacaacacctatttcaacttgattattgattctggggatgaatacggtgttgctcagacctgcgcagacaatcatttttgtgccgtcaaggtcaaattcgcctttgtcatatttcggaaaaagtccctgattcggagcgattactccgccgatgaacggcaattgaatctgtcctccgtgggtgtgaccgcagacgattaagtcaatgtcggttttctttgcgtcctcggcaatgtattcgggctggtggtgcagaagaattgtgaaattgttctttgctttttcggcaaattcttcccacagcgttcttgacggaacatcgtcatcgggagtgtagaactcataataagggtagtcgctcattccgccgataagcacactcttgccgtttttggtgaattttatgtattcattatcgagcaatacagcgcctgttgaatttgtttcgcttttaaaatccgttccgaatttggcggcattgtcacgctcatggttgccgagacagcagtatgtgggtgcaatttttgaaagcttttcaagcacatctttcatcttcgttgtgtcgggatcgccacggttgaccatatctccgcaaactgcaataaaatcgggattttgttcctttacaagctctgcaaggtctgcgttcttttctccgtattccttgttgtgcagatccgtgatgacaacaaatttcagctttgcgtcgttcttagtattgtttacacagtaatttgtgattgcaattgtgttgtcacagtaaacgccccatattacgagagtcacaaacagcacaagtattattgctccgaggattatcgaaaaatttttcattcaatttaccgcccatattaagtatggtattattttaggctcgttttgtgcggttgtcaacaaatgtgtgtcgaacaagtccgattattactgttccttgtgctttgattgtcggattttaagttgatttaggaattgctttgtttgacattccttttgcactgttgtataatgaatcataattgtatttatatgttactcgggaaatttacacaaagttaaacagaagaggtatgggttatgaagaagattaatttgcgtaagatgtttctggctctcgcagatgtgtttattatcgttgtcagcggtattcttgcaaattatattctcttgcttgtcggctacataggtgctgcttcaagcaaaggcttgttgagctatattgttattgatcttgtcatgtgtctgtttacgctttatataagcggaacatattcaaaattgtggcgatactttaacgcaaaggactatatggtgtgcggaactgccgtcttttctgggtttacgctcggctttgtaatctcgttgtttttgcagattccgcagagaaagattttttgtatagtacatttcgcaatagcccttgtcggaattcttgcattccgttttgttttcagaaggacttttcttgaccttaccgaggcaggaagggcagagggcggagagcgcacccttattgtgggcgcaggcaatgccggcagaatgattgttcgtgaaattcacaatgcgaaagagcagggtgatgttaataatccttcaaaaagcatcattccggtatgctttgtcgatgatgatttgaaaaagctgaatcagaaaatcgaaggaatccccgttgtcggaacctgtcccgaaattgttaaaatatgtgatgaataccgtatagacaatattattgttgcagttccgtcatgtgaggaagatgagaagaggaagattcttgactactgttccgcaacagagtgcaaaatcaagattatcccttatctcggtgagcttttgtttgatgacgggcatacacagcttatttcacaggcaaaggaaatcaagattgaggatcttctcggcagaaaacccattgagtttgaccgaaaggagattcatgaccttatcaacggaaaggtttgtcttgttacaggcggcggcggttcaatcggcagtgagcttgtaagacagattgcaaagaatgatccaaaacaaatcatcattgttgatatctacgaaaacaacgcatatgacattcagcaggagcttgtgcttgaatacggcacaaagcttaaccttgtaacgcttatttcatcggttcgtgattacgacaaaatggagcttatcttcaagacatatcgccccgaactcgtattccacgctgccgctcacaagcatgttccgcttatggaaaccgttcccgaggaggctgtaaagaacaacatctttggcacattcaatgttgcaacccttgcagaaaagtacaaggcaaagaagtttgttatgatttcaaccgacaaggctgttaatccgacaaatgttatgggcgcaacaaagcgtgcgtgcgagatgattattcagtacaaggcgcagcacagcaccgataccgaatttgtaacaacaagattcggtaatgttctcggctcaaacggctcggttattccgctgtttcgccgtcagattgaaaacggtgcgcccgttaccgtaacacatcccgatattatcagatatttcatgactattcccgaggctgtttcgcttgttcttgaggcaggtgcaatggcaaagggcggtgagatttttgttcttgatatgggtgctcccgtcaagattacaacccttgccgagaaccttatcagaatgtacggtaaggttccgtacaaagatgttccgattatctttacgggacttcgtccgggtgaaaagctttttgaggagcttcttatggacgaagaaggtcttaagtcaacacagaacaagaaaattttcataggaaatcaaattaaaatagacgaaacagatatgctgtcaaagcttgaggttctcaaaaagaccgcagaaaacaatgacagtgaaaagacagttgaacttttggcagaacttgtacctactttttgccacaaggtcaatgattaaccgaaaaggagaaattttatgtgcggtattgtaggttatgtagggcctaaggattgcagtgaggtgcttgttaatgctctcacaaagcttgaatacagaggctatgactcggcaggtattgcggtttttgataacggagaaatcaagaccgtaaagaccaagggcaagcttcaggacttaaaggataagcttgcagaggtcggcactccgaaaggtcatgtcggcataggtcacacccgttgggcaacccacggcgagccttcggatgtaaactcacatccacacagcggtacaagggttacaatcgttcacaacggtattattgaaaactatatggagcttaaagacttcctcatctcaaagggaagaacttttttaagcgacacagatacagaggttgttgctcagctcctcgactataaatacaacggaaatcctcttgaaacaattgacagtgtaatggctgagcttaagggctcgtttgcactcggaattatgttcaaggatttccccgacagagtttttgcggttcgccgtgaaagtcctcttatcgtaggcgttgcagagggtgagtgctttattgcgtccgatgttcctgcaattcttcagtacacaagggattattatcttcttgaccatgatgaaatcgtaacactttcacctgacggtgtttcgttcgttgacgaacaccttgatccgattgaaaaggaacttcagacagccgactgggatatggaggctgccgaaaagggcggttatccgcactttatgattaaggaaatcaacgaacagcccgaggctatcagaacaacgattatgccgagaatcaaagagggacttccgttccttgaggaatgcggcatcacaacggaaacaatcaagaatttcaaaaatatcacaatcgttgcctgcggtactgccatgcacgcaggtatggtcggcaagtatgttattgaggatatcgcaagagttcccgtaaatgttgacattgcgtccgagttccgttacagaaatccgattgtaggcgagggcgaccttgtaatcatcatttcacagtcgggcgaaacagccgacagccttgccgcaatgcgtcttgcaaagcagaagggtgccaaaacccttgcaatcgtaaacgcaaagggcagttcaattgcccgtgaggcggatatgctcatctacacactcgcaggtcccgaaatttccgttccgtcaacaaaggcatacatcacacagctttccgttatgtatctctttgcctttgagcttgctcttgcaaaggaaacaatcagcacagccgagtgcaagcgacttgtttcggctctcacaaaaatgcctgaggcagttcagtatgtaatcgacaactgcgaggatatctgcaagttcgttgccacaaagcttgttgcaaccgacagcttgctttacataggcagaggtcttgactatgccctttcaatggagggttcactcaagctcaaagaggtttcgtacattcactcagaaagctacgccgcaggcgagttgaagcacggcacaatttcgcttattgacgaggatgttccggttatcgccgttgcaactcagacaggtattatccccaagacaatcagcaatgttgttgaggttaagtcaagaggtgcaaaggttattcttgtttgtacagacgcctgtgtaagagaactcaaggacggtgttgcggattatgttatcgaaattccgcatacagacgagcttcttatgccgattacagcggttgttccactccagattcttgcttattacacatcaatcaacagaggtattgatcccgataagccaaagaaccttgctaagtcggttactgtagaataaacggcggtcttgtttttaattgaaaattgaaaattgaaaattgaaaatttcggttggcggtgtgccaccgcagtcaattcgagaagatagtcagataaagaaattgcattgatgcccgatacggcattgatgcaatttttgttttatatgaaagtgaatgtttatttatataattttaatttgtacaaatctttgcgtggttatctgcaggcggataatatccgtacatacagttttgcaacaacttccgtatataccgaaaatatacaaaaacagtcgggcgagaatgttttgcattcttgcgaattgtcttctcgaccataattttccattttccattttccattttccattttcaattttatgcacgctcaggcgtaatatgttctttaatatcatactgcattcacgaatagggtactcttgttttcaaatttaaacggtaaaaaccttgtatttttttgacagattatgtataattaattagatatacattctaaaaagcagtattgatgaatctaatttagtttcgggggaatatacggacatgatgaaaactgtttttaaaagagctgtaacgcttgcaatttgtgccgtaacggtattttgcggtatttttgcctgttcaggcgcaacaaaagattacgagattccgcagattgacgatatgacgctttcaatgcctgacggtatgagcgctgttacaagggacagtaaaagcacagataaatatttttctgttttcggtcttgactatgacacaacaatgaaaacctttcagaacggaaatatctatcttcagggtatggataatatgtcatcggttattctgaccgtgacaatgacaaaaaatgagagcagcgagaatgttggcaactatgctcagctttcttcaagcgagcttgcaaatatacgcaacaattttcttaattccgacgagtatcggagctgtactcccgaccaaaaagaaaaagttgtgtggcttgtgtttgacgcaactgctcagagcagtaagggcgatgtgaaaacctttgttgccaacacggtttatgacggtatgaacattaatatcacaatgcagagaacagagggtgatgttacaaccgttgactacgatactttttccaaagttgtatcttcggtaaaattcagcgacttgccgttttcaaagggatttattccgtacataatcatcggcggcggtgttgttatccttattttgattgttctcatcataatttttgccgtgagaatcagaaagcataaaaaggctaagaagaataacgctattcttgaggagcttgcagtcaagtataaactcggtgaaaagggtacagactacgacattgacaattttgacgattctcccgaaaagcccgataaacactcaaagaaaaagcagagatatgcggaagaggttgaagaagaaccggcttcgccgggcagaagatatgctcccgagccgataatcgaaaacatggaagaaccggaagaaattacaagtgagtattcaaactttggttatgacacggatgatgccaaggaaaaagaaattgacgagataatcaactccgcgaaggcttacaagagtgagcttgagcgtgaggcatataaaaacaactacggttacgaggaaaacagcacggaggacgaaaaaaaaaaggagcctaccgcagcagatacctcagagactgaacccgaaaaaattgacgaaaacgaaaaagataacgcagaaacacctgaaaaatacgaggacataagctcttcgtcgggtcctacactcgttatccccgaacccgaacacgatctttttgaaacaagcgagcctgacgatatcgaccgtgaggacgatgccgatgttgaagaaaccgaggaggtttccgaacaaaagcatccgcttgaaaaaaaggttgacgagtacgcaaacatcattttcggcagcgacgatcccgaagaggaaaccggggaagaggttgatgacgaggagcttgtaagggcaaaggctaagaaaaacaagtttgacagcggttatgacttttttgacgaagctcccaaaaagtcaatgggggttatcaaaagctcagacctcagagatgccgaggacgttgatgttatcggcgaggttgaaagaaaagcagaaaccgtaaagcagaacgctcttgaaaaagagaataataaagaaaccgagggtgaaccgaatgataaacggtcaacggaagaggttcttgccaatgtaggcaaaaacatcggtaacgctctcaggagctttgcaggcggagttaagaattttggcattcactgcggatatttctgcaagaatgtttcaataatgataaagcataagcgtgcgattgccaaacgcaaaaaggcagaggaagagagaagagagagagaaagacaaaaggcagagcgtgcaagaatgcgtgccgaaagaggcgaaagtgacggacttgttcaggttcacagcagaaccgaccgacgcccccagcagaatcaccgccctgcaaacagaaacaagagaagataatttcttttcttaacggaggaaaaacatggaaatgctaattaaaaacgcagtggttgtttcccctgccgacaagcttaacgaaaaaacagatattctcataaagaacggcgtgattgccgaaatcagcagcggcattacatcagacggggagattattgatgcagacggtctttgtgccgttccggggtttgttgatatgcatgtgcatcttcgtgatcccggtcagactcacaaagaggatattatcacgggatgcaaggcggctgccgcaggcggtgttacaagcctgcttgcaatgcctaacaccaatcccacaaccgacagccccgaaattgtaaagtatattcttgacaaggctaaagacgccgacagccgtgtttatgttgcggcaagcgttaccaaggggcttaaaagcgaagaacccacagacattgacgctgtgaaaagtgcaggtgcaatagcacttaccgatgacggcagacctgttgaaaacacaaagtatttgagtgacgcaatgaaaaaagctccaaagctcggcatgacaattgtcgcacattgcgaggacttgtttcttgccgacggcggtaaaattaatgagggcgaggtttcggaaaagctcggtgtcaagggaatccctgccggtgccgaggactgcggaactgcaagagaaattgcacttgccgccgctcttaatgagcctattcatatctgccatgtcagcaccaaaacaagcgttgcacttatccgtgatgccaaaaggagaggtgttaaggtgaccgccgaaaccgctccgcattatgtttcgctcacggacagggagcttttaagaggtgacgctgattacagaatgaatccgcctctcaggactcaggctgatgttaacgagattatcaacgggctttgtgacggtacgcttgatgccatagcaaccgaccacgcaccgcacacacccgaggaaaaggctgattttataaaagcccccaacggttcaatcggcatggaaacctcgtttgcggtctgcaacacatacctggttaagacaggcagaatgacgctttcacagcttgttgagaagatgagtgttaatcctgcaaggattttgaaaatcaacgcaggcacactttcagtcggtgcaaatgccgatgttgttcttataaatcccgatgaagaatggacagttgatgctggtaaacttcacggcaaaagcaaaaacaccccgttcaagggcagaaccctcactggtaaagtcaaaaagacaatcctcggcggtaaggtagtttttgaagattgagtttgttttaattgtagatgttgatacgattaaaattgtgcaaacggtagctgtactacgctcgggcataaatgttttttatttgtcaaactgtctgcacgaattggggacggcggctcgccgtgttcgctcaccaaataaatttaatttaatataaactttaacataaaggagtaaaattatggcacagaaaggcgacctcctgtcggtaagacaggacatcagagtagtagacgcaacaatccgtgacggcggtctttgtaacgatttcagatttgacgacaaatttatcaaggctctttacaatgcaaatgttaaagccggtgttgattatatggaattcggctacaaggcatcaaaggaaatctttaacgaagaagatttcggtaagtggaaattctgtaacgatgcagatatcagaaaaattgtaggcgacaacaagacttctcttaaaatcgctgttatggctgatgtcggcagaacagattttaagaaggatattatcgcaaagaaggacagcccgattgacctcatcagagttgcaacatacatcaacgcaattcctgcggctgttgaaatgattgaggacgctgcaaagaagggctacgaaacaacaatcaatattatggctgtttcaaaggcaagaaccgaggatattacagcggctcttgaaactctcggcaaaactcccgtaaacgctttctacattgttgacagctacggcgcactctatcccgaggagtcaagacgacttgcagacctttactgctcaattgccgacaagtacggcaagtcagtcggtattcacgctcacaacaaccagcagcttgcttttgccaacacaattgaggctatgactcagggtgtcagctaccttgacgcaaccgttgacggcatgggcagaggcgcaggcaactgtgcgcttgaacttcttctcggtttcctcaagaacccgaagtatcaggttgctcctattctcaaaatcattgaggagtacacccacaagtttaaggctgagggcgttaagtggggttacgatattccgtaccttctcacaggtcagtacaacacacatccccgtcctgcaattcagttcgtaaaagaggacagacaggattattacaagttctcaaatgaactttatgatattatcaacagctaaaaaataataattcgtaggggcgaacaacagcattgtaaaaaagatattgcagtcgggatatgaattgtttgcccgaccatagaaagaataacaaaaaatgaggagaatcactatggcatttgacagacttatcgaaaatattgtaaaaatgcagaatcctacggttgcaggtcttgatcctaagcttgactatgttcccgaatcaatcaaaacaaaatgctttgaaaagtatggcaagacgcttgagggtgcggctgctgcactttttgaattcaacaaggcgcttattgacgcactttatgatattgttcctgccgtaaagccacaggctgcatattatgaaatgtatggctggcagggtgttaaggctctttgcgacacaatcgcttatgcaaagtcaaagggtatgttcgttatcacagacggcaagcgtaacgatatcggcacaactatggaggcatatgctacggcacacctcggtcatacagatgttgcaggcgaaagtattgacgcattcggtgcagacgcactcacggtaaacggctacctcggaacagacggtatcaagccgcttgcaaaaatttgcgattcggacgacaagggcatttttgttcttgtaaaaacttcaaacccaagctcgggcgaacttcaggatatgaagcttgaaacaaatgagagcgtttatgagcatatgggcaagatgtgcgaaggctggggcgaagaccttatgggtaagcatggctattcggcagtaggcgcagttgtgggtgcaacatatcccgaacagctcggtgaaatgagagcaaaacttccgcacacattcttccttgttcccggttacggtgctcagggcggcggtgccgatgatgttaaaaacgcatttgacgaaaacggtcttggtgcaatcatcaactcaagccgcggcattatgtgtgcatggaaaaagcaggggcttacagaagatgactttgccgttgccgctcgtaaagaggctgagcgtatgagagatgaaatcgttggttgtatcggcaaaattaagcttggctgattcatttgcacaacagaatcacgaaatttttcgttttttatgctttagtgctatgaatttattgactttagcgtgctaaaagcgtataattaaaatgtatttatttttacaactatatttttaaattttctttaaaaagggagatatcagaaatggcaagagtatataatttttcggcaggtccttcaatgctgcctgagtctgtgcttaaaaaagctgcggcagaaatgctcgactacgaaggcagtggtcagagcgttatggaaatgtcacaccgctcaaaaatttacggtacaatcatcgagggtgccgaggctcttttgagagaggttatgaacattcctgacaactacaaggttcttttccttcagggcggtgcgtcaacacagtttgcggctatccctatgaaccttatgacaaagagcggtaaggctgattatgttattacaggtcagtgggctaaaaaggctcatgcagaggctgcccgttacggtcaggctaatgttgttgcttcatcggctgacaagaccttcacatacattccaaagcttgatccttcaacattcacaaaggacgctgactatttctacatctgtatgaacaacacaatttacggtactgtttatcacgagcttcccgacacaggtgatgttccgctcgttgcagatatttcttcctgtattctttcaagaccgattgatgtttcaaagttcggcgttctctatgcaggcgcgcagaagaacatggctccggcaggtcttacggttgttatcgttcgtgaggatcttatcggcaacgctatggatatcactcctacaatgcttaactggaaaactcacgctgacaacggttcaatgttcaacacaccgccttgctacacaatctacattgcaaagcttgttcttgagtggattaagaacgaggttggcggtcttgataagatgtatgaaatcaacaaaaagaaggctgaccttctctacggtttcctcgattcttcagagcttttcaagggtactgttgttcccgaggatcgttcgcttatgaatgttccgttcgttacaggtgacgctgaccttgacgctaaattcgttaaagaggctactgaaaacggtcttgttaatatcaagggtcatcgcacagtcggcggtatgagagcttcaatttacaacgctatgccttatgagggcgttgaaaaactcgttgagtttatgaagaagttcgaggctgaaaacaagtaattattgaatattatgatataacgggcgaacgctgttcgcctgttattgtaaattcttaaaataaaaaattaaaaaggattgattttgatgtataacattcttacattaaacaaaatcgccgctatcggcacaagccgtctcggtgataactataaatacggtgacgatgttcagaaccctgacgcagttcttgtaagaagtgccgcaatgcacgatatggaatttgccgacaaccttcttgcaattgcaagagcaggcgcaggcacaaacaacattccgaaggataagtgcagtgagcagggtattgttgttttcaatacaccgggtgctaacgcaaacgctgttaaggagcttgttatcgcaggacttcttatttcaaaccgtaaggttattgagggttatgaatgggcaaagactctcaagggcaacggtgcagctgtcggtaagatggttgaaaagggcaagagtcagttcgtcggtcccgaaatcaagggcaagaccctcggtgttatcggtcttggagcaatcggtattcttgttgcaaatgccgctgttgctctcggtatgaatgtaatcggctttgacccgtttatgtctgtaggcaacgctctcaagcttgctcctacagttaagctcatgaagagcgcagaagatgttatggtaaattgcgactatctcacaatccatgttccgcttactgatgacacaagagatatggttgatgccaatatgattgccaagatgaaagacggtgttcgtattctcaacttcagccgtgacggtcttgttaattcaacagcagttcttgaggctgttaagagcggcaaggttgctaagtatgttacagacttcggaacagacgatatcctcggtgaagagaatattatctgcctcccacacctcggtgcatcaactcccgaaagtgaagaaaattgtgctgttatggcttgtgatcaggttaaggagtatctcgagaacggtaacatcatcaactccgtaaactatcctgcaatttcacttgcaagaacaaatgctgacgatacccgtttctgcgttgctcacaagaatgttcccgagcttctcaagaaggttctcacacagatcagcggcaatgttgaaaatatgctttcaaagagccgtggcgactatgcttacacaattattgatgttgcaggcgccggtgcagatgaccttgcaaaaatcgcagcagttgacggcgtaatcagagttcgtgcaatctgatttcgattttaattgaactttaattgttggttgtaaaaaattatccgagcattgttttgatgctcggattttttgcgtttatttgtacaaatggttacaatgctacactctggcatgatatgctttcaatattataaactgtctgcacgaacggggtgcggtggtacaccgaccagatggtatttttttgcattggcaattataaatgttacggaaattgcaacggcacacaattctgcaacgggcaatgccgaccatacaccgtttatgcctataaacatcggcaaaatcagcattgcggcacactcgaaaacaagcgttcttgcaactgaaattacggctgaaatcttgccgttgttgagtgcggtgaaaagtcccgatgcgaaaatattcattccgcacaacagataatttattgcaaaaattctgaatccgctgagtgcaatctgctgaattttttcgttgcctgccgagaaaattccgacaagcggttctgcaaaaaattcagatgccgtaatcattgcaaccgaaattatcagcgtgatttttatgcataatttgaacagcttttgcagtttttcgtgattttgtgcgccgtagttaaagctgatgacgggtgaaactcccgaagtgaatccaaacgaaaccgcagtgaaaataaagtgaatgtacaaaatagcacttatagccgcaacgccttttgcgcctgcaaagtgcatcatctgaatgttgaacagcgctgttgtcacggctgttgaaagatttgtcacagcctctgacgagccgtttgccatagcaaagaggatttcacttaccttgaattcaggcttgccaaagtgcagagtctgctttttgttgaaaaagagcaaaagcggaattgcacccacagccattccgatgattgtgccgagtcctgcaccgattattccaaaatcccacacagccataaaaagaatgtcaagcacaatgtttgtgcaacccgacagtatcgagaaaacaagcatgatatgtggcttgtctgctgttacaaggtacgattggttgagcatctgccagcacattacaaagccatacggaatcataacgctgccgtagtcaatgcagtaggggagaattttttcgtttgagccgaacatcatgtacataggttcggcaaaaattgtgaacagcacagcaatgataacagaaatgaccgttgccgtgattgcaacaccggacataagtcggtttgcttcctcctgtttgccttctcccattttctttgcgattatagcatttgagcctgttgaaaacattaagcccacagccataaatacgagcgtgaacggatatacaatattgattgcggacaatgcgtcacttccgacacagttcgcaacaacgattccgtcaacaaccgtgtaaagtgacataaaaaccatcataagaacggttggcaaagtgaacttcagaatcgtttttgctttgataggttttgcataaattgatgttgccat

SEQ ID NO: 67 - DNA, 13042 bp, unidentified
  source 1..13042: mol_type = unassigned DNA
atgactttaaaaaagaacgatattgtaaaccttacaataacttcggcaactgccgagggcagcggagtcggaagaacagatgatggcattgccgtttttgtacagggttctgcaatcggtgacgaactcaatgtgcgtatattaaaggttaagaaaacctacgctttcggcaaaatcgaagaaattctcgttccgtccaaggcgagaattactcccgactgcgaaaactttatgaagtgcggcggttgcacatggcgacatatttcttatgaagaagaatgcaaaataaaacagcaaagagttgaggatgccgtaacacgcatcggcggtcttgataatgttgttttcaagccgataatttcgtcggataatatcacaagataccgcaacaaggcgcagtatcctgtcggtcttgaccgtgacggaaatgttgtgactggtttttattcattccacagccaccgcataatcaattgcaccgactgtattttacagcccgaaatttttgcaagggtaattgaaatcacaaaagattttatcgcaaaaactaacacggaaatttatgatgaaacaacaggcaagggaagacttcgccacatttatatcagaattggcgaggtttcgggcgagcttatggtgtgctatgttgtcaacgcaaacggtcttaaacaggaagatttactcgtgaaaatgctcaaatccgaacttccgcagttaaaaagtgtgattattaattctaacagagaaaaaaccaatgttgttctcggcagaaaaaacagaacaatctacggaagtgaccatattaccgacacactttgcggattgcagtttaaaatttcaccgttttcgttctggcagatcaacagaaaacaggctgaaaagctttacggcaaagccaaagaatatgcaaatcttaaatctgacgaaattctgcttgatttatactgcggaacgggtacaataggtcttacaatggctgattcctgtaaacagcttatcggtgcggagattgttgaagatgccgtgaaggatgcaaatgaaaatgcaaaagcaaacggcattgaaaatgcacgattcatctgcggagatgcctcagatgccgcatttcagcttgaaaaagaaggcttaaaacccgactgcgtaattcttgacccaccgagaaaaggctgcggtgaagagcttgtaaagacaatttcaagaatgtcaccgagccgtgtagtctatgtatcatgtgaccccgcaaccctcgcaagagatttaaaattcttcacagaaaacggctacacccccaaagaaatcaccccctgcgatatgttctccggaacctcccatgtagagagcgtggctctgttgactaaagtacaggagtaaaggtgtgaaaattattaaatttgaagaaatctatcgtgatgatatgatttttacggttttacaggcaaaagatgctttgggtagaaaacctactataaatcctgaccttcttgatattaaggcaaactatcttgattgcaatgatatgttttggcttgcaatagatgaaaatgacagggtagtcggatgtattggatgttcaagaattactgatacagatcaggcatttttgcataggctttatataaaaccgtcattaaaacgaaagggaatcggttcaaagttacttaatacggcagagttatggatgcgtgaaaacggcattgctgtttcaaaagtacatttggggacaccaaaggagcagtggtttgaatcttatgttttttatccgaaacacggatatatagaatatgaaccaaggtatatgatgaaggttctgtaattaatgaaagtcaaaagtaacatatttattatgattattgagtagtgcaacaaattaaaatgaaatatgattggggtttggggtacgatattgaattgacttatttaaaaagaaaaagtgaaaccgatggtgatgctttttgatggaggtgcacaaaatggcaaagaagaaaaatgaaataagtattcgctcaagtgctgcggaatatctcacatatgttgcttctgtgggaaatcaggcagatagctttgaaatgcgttatgaggacgaaaatatatggctcacacagaaaatgatggcaacgctgtatgatgtttctgtgcctgcgatcaatcaacatctaaaaaaaatctttgaagacggcgaattagtcgagaattcagttattaagaaatacttaacaactgccgacgacgggaagaattatcaaacaaaacattataatcttcaggcaattattgcagttggatttaaagttaataatgaacgagcagttcgattccgtaaatgggcaggtcaaattgtaaaagattataccattcagggctggacaatggatgtagaccgtctgaagaagggcacgatgttcacagatgaatattttgaccgtcagttagaatacattcgtgaaattcgcctgtctgagcgaaaattctaccaaaaggttacagacctttatgcaacagctttcgactatgataaagatgcaaaaaccacaagactctttttcaaaactgtgcagaacaaaatgcactatgctacgcacagacatactgctgcggaactgattgttgaacgagcggatgcggaaaaggaacatatgggactaacctcttgggaaaatgctcctgatggtaaaatagtgaaaagcgatgtatctgtagcaaaaaactatcttactgaaaaagaattgtcttttttggaacgtattgtatcgctgtatctcgattatgcagagttacaagccgaacgtcatattcctatgagcatggaggattgggcgaaaagacttgacggtttcctcgaatttaacggtactgaaattctcacaggagcaggaaagataagtgcagagcaggcaaaacttcacgcagaaacggaatttgagaaatatcgcatcattcaggacagattgtttatgtctgactatgacagatatttacttgaactggaagaaaagatgaaagaagagtaaatggaaattttaatgttttgcgagaaattataaaagcgtctcattgcatgagtctgtttattgagatatgattggcttggaggtgatacattatggcaaatgaagataaaaaggattttaatgctatgcttatggatagcaaggatatgcctaaatttcaaataatcacagatgaaaagagtattaaaaaatatggtggagataaaatgtattttgcaccgccaatcgactatgacaaagtaatgaaaaaaattccgtatggtaaagtgattactctcggaaaaatacgagaatactttgcagagttaagcagtgccgattttacagagcctatcacagccggaatttttgtttcaatagttgcatgggcgagttatcagcgcacagaggataaaaccccttattggagaacattaaaagcgaatggagaattaaatgcaaagtatcccggaggaattgaggcacaaaagaaaatgcttgaaactgagggacatactgtagtgcaaaaaggaaaaactaatatcaagtattatgttaaggattatgaaaaagcattatttacattgaaatagataatgcgaaaacttcagtttcacggacatatccccacaaacggcagaaccacgaaaaaggctgtggatgtattcccttgaacccaaaatcagccaagaaattcatcgtattcagatgagccatgtggaaagcgtggcattgattgaaagaaattaacaaaataatatagaaaaggattaaaaatgcaaaatacacttaaaataaaacgaacaaaaacagctttggcatttaatcttgcgattatcgcttgtgagattgccgcaataattatcgtgtttttcaaaataggctgctatccgcttgtatattacactgaggacagcaacctgtttgcacttgttgcctgtgcggttatggcaggctttcaggtgcgatatctcaaaagcggaaaagaaattccgcactcggttcagatgtttaaatatatggcggcggctgtgctttcggtaacatttattgtagttcttgccgtactttccccgatgcgaggagagggcgtaaacggttggctctatatgctttttaacaaagacttcacctttttacatactttgtgtccgattcttacaattttatcgtttgtgctttttgaaaaagaacctcaccttaacacaaaatcagctttcacggctacaatccctacattaatatatgcgattgttcttattatacttaacatagttggtgcatttgacggtccatacccgtttttgcgtgtgatgaatcaaccgttgtatatgtcatttgtttggttcatcgttatagtaggcggtgcatttttccttgcacttctgcttcaaaaacttaattcaacaggaagaaaaagaaaataatagataataagacagtaaacagatgaaaatttcagattggagtgatttttatgaaataccgcaagttggtggagaatgctaaaaagccaagcggcttttggggcaaaatgatgattaaggctatgaataaaggacattcaagcctcacctcatggggacttgaacatatgaatatcgaacgcaccgcaactgtacttgacataggctgcggcggtggaaaaaccgttgaccgactttgctcaattgttgccaacggcaaggtttacggaatcgactattccgaactctcggtaaaatcctccgaaaaactcaactcaaaaaatatactctgcaacaaagcgaaaattcttcaggcatcagtatccgatatgccttttgatgacaatacattcgataatatcacggcagttgaaacctactacttctggcctgataaggagaatgatgtaaaagaagttttccgtgttctcaaacagggcggaacggttatgctgctttttgaaatgctcagaacagacgatgatccgttcaagtgggaaaaggttgaaaatatgctgaatatcaagtcggtaactccgcaggaaatcagagccgtacttgaatcggcaggctttgaaaacataaacacatacactaaggaaggtacaacatggctttgtgccacagcacaaaaaccgaaggatgatgaaaactaatgaaggctttgattacaggcgcaagttcgggcataggtaaagaaatcgcccgatatcttgcagaactcggttatgaccttattcttgtatcacgctcaaccgataagcttaacaagctgaaagaggaactttcaaatgtgaatgtcagggtaattacgcttgatttttcacgagaaagtgacagcctggatttgtatgagcatattaagaatgaaaatgaacagattgattttcttgtcaacaatgccggattcggtgcatacggaaaatttttggatgttccgcttgaaagagagcttgaactcattcacacaaatgtttcaacggttcacattctcacaaagctttttcttaaagatatggcggagagaaacagcggatatattctcaatgtaggttcagccgcaggatttcttgcaggaccgacatttgcaagctactatgcatcaaagaattatgttgtccgtcttactcaggcaattcatgaggaaatgcgtagggataataaaaatgtcaaggtttccgtactttgcccgggtcccgtaaaaaccaacttcaataatgttgcggatgtaaaattctgcataagaggacttgacccgaagtttgtcgcaaggtatgccgttgacatgaccatgaagggcaaaatgattatcacacccggctttgaaatgaaagcggtgtcgtttttcagacattttgcacccgaaaaacttctcacgagaatttcttataatgtgcagatgaagaaaaacggtataaaataattatcatatatatcatatagaaataggggaggtgacacattgaggataaaattcgttgacaaggcgataaaactttacaaaagaataacaggcagatttgaaccgataacaagcaaatgcgttcacgataatatttttgcaattgccggacagtcggcattctttattatattatcggctgtgccgctctcaatgttctttgtgtcacttttgcagaacctgcacattccgattgattttgtttatcacggactcagcagtgtgttttcgtcaaaaattgccgatgatttaacatactttctgacctctgcctatgaaagtgctgtgggaatttctcttgtaacgcttgtagtcactctgtggtcggcggcacagggaatccacgcaatcacaaacggtcttaacagaatttatgatgcttacgaaaacagaaactggttctttttaagaataagggcgatgttctacacaattgcattgtttgtaattttgcttgcgtcacttgtacttattgtcctcggttcaacaattaacgattttctttcaccgcatctaaaatcgttgcctgacataatcggaataatctatcatctcagatatatacttatctttttgtttctgacggtattgtttgcgctgatttacaggaactttccgaacatctcacgcagtgagcataaggaatacggctttaagtcacagttgcccggtgcgtttctctgcacggtttcgtggtatgttctttcgttcggtatttcggtttatgtgtcggatttcaacggattctccgtgtacggaggtcttacaagaattgccgttattatgatttggttttactttcttatggtttgtcttatggtttgtgcggaaatcaattatgtctatcatgacaggataaaagcgtttaccgttgcaaaatttaaaagaaaggtaaaaaccaaaggttcagagcttaatcagataagaaaagaaagaaaaaataataagtcaaataaaagtaaataaatcaaaataaaacacttccgttcggtgatactaccaatggaggtgttttttatgaaaagaaaattttctaaaaaggtgatttcaatattgctcgtatttgcaatgctcatcggcggagcgtgcttttcatgcacaagtgcagcggcgtttgaccttgactatatcagcgaggacggaatgaagctcggctacagtataatcaagggctattccaaaatgtcgatgaaaaaaggtcagtacaaggacgggaaaattgccgtttactgcggacttgatgtgaataatctatatgttatgggttcgctcggttggttctatatgacaaacggtgttgatctcgagcgtgcaatgacggataacgattacgcaatggagatgattgcaaagcttgattcacatcttcaaggtgcaggcataacaaatgacagggcaaaagaaaagaaagccgagattttaaaggatgcaaagtatgtttatcaatgctttgacacattgggactttacattgttgatgttgacaaaaacagagccgatgaactcatgaacgacagcggtattgattttgtacttgacggcggttgcgttcccaaaaatatgaaagacctcaacattgacggaaaaacagatgaaaaggacgctgagcttattcagaagtatcttatcaaagacctgacctttgacgattatgacgaaaatcagtatgctctttttgtttgtgatattaacggtgataaaacccccgatatccgtgatgcgacagaaatcctaaaaaagtgacaattgtcataatttgtgcaaagtgaatatgattttaactgcgacagctgtaattttagctgtcgcttttgatttgtgacagcaatgtgaaactttgaataattatttgtaatttctcttgacattcaaaatgaaggtgctataattactgatacaaattgttttgtatcgaactattctatatagaacaatatctcataagtgtgatttcggaggtgaaataatgtgtgatgacaaaagcgtaaaaagctgtaagtgcaacaaacgctttaatgattcaatcggtcacgaaatcaaggtgcttaatcaggttttgcagagaaagttaatctattccgccaaggataagggtgtggataagctgactcttatgcacggctggattattgcatatctctatgatcatcgtgatgaagatgtttatcaaaaagatattgaaaacgcattttcaattgcccgttcaaccgttacaagtattcttaaacttatggaaaagaaaaattacataacgagggagagcgttgaaagtgatgcaaggctcaaaaaacttgtcttgaccgaaacaggtattgaacttcattacaaaatcgaaaatatgataaccaaaaacgaaactttgcttgacagtctgctgacaaaagaagaaaagaaacaatttctttttcttataaataaaattctcagcggacttgaaaatgcaaattaaaacggaaggagataagtatgataaaaactttggcaaaaaatatcaaaggtttcgtcaaagaatccgttctgactccgttctttatgatactcgaagtaattgttgaaacaattattccgtttcttatgtcatcaatgattgacgacggtatcaacaagggcgatatgcagcacatattcataacgggcggttatatgggtgcacttgcactcacgggcttgtttgcaggtatgatgggcggtatctacggtgcaaaagcttcggcaggctttgcaagaaacctcagacgctcaatgtttgcaaatatccagtcattctcgtttgccaacattgaccgttactcaaccgcaggacttgttacacgtatgacaacggatgtaacaaatcttcagaatgcatatcagatgcttttaagaatgtgtttcagagcgcctgtatcgctcatctgtgcaatggcaatgacattcatcatcaatgcaaggcttgcctgtatttatctcattgcaacaattttactttctgttgttcttgcctttattatgaaggcaacatacaagtatttcagtcaggtttttgaaaagtacgatgaactcaacgcaagcgttcaggaaaatgtaacttcaatcagagttgtaaaggctttcgttcgtgaaaaacacgaagttggcaagttccgcaaggcagccgacaatgtttacagactttttgttaaggctgaaaatgccatggtaacagtatcaccgattatgatggttacttcatacgcatcaatcatccttgtaagctggtttggcgcaaatatgatcgtaagcagtgagcttacaacaggtgaacttacaagtatgctcacatattgtatgaacattcttatgaatcttcttatggtggcaatggtgtttgtaatgctcacaatgagcattgcaagcggtaagcgtgttgcaggtgtgcttaatgaaaaatcaacgcttgcaaatcccgaaaaccctgtttacgaggttaaggacggaagcattgagtttgacaatgtttcattctcatacaacacaaaagccgaaaaaccgattctcaacgatatcaacctaaaaatcaaatcaggcgaaacaatcggtattatcggcggtacgggttcttcaaaaacaagccttgtaaaccttattgcaagactttatgatgtaaccgaaggttctgttaaggtcggtggaaaagatgttcgtgactatgatatcgaaactctgcgtgacaaggtttcggttgtgctccagtcgaatgttcttttcagcggtacaatccttgacaacctcagatggggcaacgaaaatgctacagaggaagaatgcgtcaatgcctgcaagctggcgtgtgcagatgcgtttatcgaaagcttccctgataagtacaacacaaaaatcgaacagggcggtactaatgtttcgggcggtcagaaacagcgtctttgcattgcaagagctttgctgaaaaatccgaaaattcttattcttgatgattcgacaagtgcagttgataccgccacagacgcaagtatccgcaaggcattcagcgagaatatccccgatactacaaagctgattatttcacagcgtgtatcaagcgtttcacacgcagacaagattattgtaatggatgacggtgagataagcgcagtgggtactcacgaagaacttatcaaaaacagtccgatttacaatgaaatttatgttgcccagacaagcggcaacggtgattttgatgcgaaaggagagctgtaattatgccgggaccaatgggaagaagaaaccgaggacctgcacaaaaggttgaaaattcaggtcaggttcttaaaagactattcggtattatcttcaaaaaatataaatttcagatgattattgttttcgtctgcatcctcatcagcgtacttgcaaatgttcagggttcattgtttattcagaatcttattgacgattacatcactccgatgattcagagcggcagccgtgacttcggaccgatgctcggagcaattttaagagttgcaattttctatgcgatcggtgcggcgtcggcatttatctacgccaaaattatggtttatgtaacacagggtacaatgcgtgatttgcgttgtcagatatttgaacatatggaaagccttccgataaaatactttgacacacaccctcacggcgatatcatgagtgtttacacaaatgatattgacactctccgtcagatgatcagccagagtattcctcagcttttcaacagcggaattacaatcatagccgttcttgtaagtatgtttacactcagtattcctcttacaattcttacacttgtaatggttggtgtaatgctttttgtaacaaaacagcttgcgtcacgaagcggaaggttttttgcaaaacagcaggcagacctcggtgcgactaacggttacattgaggaaatgatgaacggtcagaaggttgtaaaagtatttaaccatgagaaaaagagcattgaagaattcaatgagcttaatgacaggcttttcaacagttcatacaacgcaaacaagtttgcaaatatccttatgccgattaacgcacaaatcggtaacatcagctatgtgctttgtgcaatcgtaggttgtatctttgctctcaacaacttcctcggatttacaatcggcaaactcgtaagcttcctcacatttaacaagagctttacccagcctatcaatcaggtcagccagcagtttaactcaattgttatggctcttgcaggtgcagaccgtatctttaaacttcttgacgaagagcctgaggttgatgacggatatgtaacacttgttaatgtacgcaaagagggcgaaaagcttgttgaaacagaggaaaaaacaggtatgtgggcatggaagcatacccacagtgaaacaggcaaaacagagtaccgtgaactcgagggcgcgcttgttatggacgatgttgacttcggttatacagatgataaaatcgttcttcacaatattgatttgtacgcagaacccggtcagaagattgcgtttgtcggttcaacaggtgcaggcaaaacaacaatcacaaaccttattaaccgattctatgatattcaggacggtaaaatccgttatgacggaatcaatatcaacaaaatcaaaaaaggcgatcttcgccgttcacttggtatagttttacaggatacacacctgttcacggataccgttatggaaaatatccgttatggcagacttgacgcaacagacgaagaggttatcgcagcggcaaagcttgccaatgcagacagctttatcagaaaacttcctgacggctacaacaccctgctcaaaggtgacggcggcaatctcagtcagggacagcgccagatgcttgcgattgcaagagccgctgttgcagatccgcccgcacttatccttgatgaggctacaagttcaattgatacccgtaccgaaaagatggttcaggacagcatggataagcttatgcacggcagaacaacctttgttattgcccacagactttctacaatcaagaattcagactgtattatggttcttgaaaagggcagaatcatcgagcgtggttcacacgaacggcttcttgaacaaaagggcagatactatcagctttatacaggcaaaaccgcataatgataatcgaaaggggagagttgcaaaggctctcctttttctgttcttgaaatattgacttgtttattgtacaataagactcagaattgtgaggtgttaaaaattaaaattaattcaaaattgattttaaagcttactgcattgtttgcggtaatctgtcttgcactctgttcgtgttcaatcaatatcaatgtgaacggttccgattcggaaagcaaaacaactgtttcagaaatcggaacattatcggttcattaccttgatgtcggacagggtgacagcatatttattgaactgccgaatcaaaagtgtatgctgattgatgcaggcgaaaatatgtacggcaaaagtattaccgaatatatcaataatctcggatacacaaatattgattatctcgttgcaactcaccctcatgccgaccatatcggttcaatggcttatgttgtaaagcataataatatcggcgaaatctatatgcctaaggttacaaccacaaccaagacctatgagaatctgctcacggcaattgcagacaagggacttaaagtcaagtcagccaaagcgggtatgaatattattgatgacaacgatttcagcataaatattcttgctcccgtaacgattgacgaggataatctgaacaattgctcgataattctaaaaataacttacaaaaacgatagctttctgttcctcggagatgccgaaaagaaagagcttgaaaccgttacggcagatatgagtgcagaagttcttaaagtaggtcatcacggaagcagaacatcaacaacaaaagcgttgcttgaaaaggtaaatcctaaatatgcggttatttcactcggcaaggacaatagctacggacatccgcacaaaagcacattaaagttgcttgatgaattcggagttgaaacatacagaaccgatgaaaacggaacagttgtcatttcaaccgagggttcaggtgtgacaatcaaaacgggacaaacttcaatgaaaagggatgaataa

SEQ ID NO: 68 - DNA, 13042 bp, unidentified
  source 1..13042: mol_type = unassigned DNA
ttattcatcccttttcattgaagtttgtcccgttttgattgtcacacctgaaccctcggttgaaatgacaaccgttccgttttcatcggttctgtatgtttcaactccgaattcatcaagcagctttaatgtgcttttgtgcggatgtccgtagctgttatccttgccgagtgaaataaccgcatatttaggatttaccttttcaagcaacgcttttgttgttgatgttctgcttccgtgatgacctactttaagaacttctgcactcatatctgccgtaacggtttcaagctctttcttttcggcatctccgaggaacagaaaactgtcgtttttataagttatttttagaattacagagcaattgttcagatcatcctcgtcaattgttacgggagcaagaatatttatgctgaaatcgttgtcatcaataatattcatacccgctttggctgacttgactttaagtcccttgtctgcaattgccgtgagcagattctcataggtcttggttgtggttgtaaccttaggcatatagatttcgccgatattattatgctttacaacataagccattgaaccgatatggtcggcatgagggtgagttgcaacgagataatcaatatttgtgtatccgagattattgatatattcggtaatacttttaccgtacatattttcgcctgcatcaatcagcatacacttttgattcggcagttcaataaatatgctgtcaccctgtccgacatcaaggcaatgaaccgataatgttccgatttctgaaacagttgttttgctttccgaatcggaaccgttcacattgatattgattgaacacgaacaaagtgcaagacaaattaccgcaaacaatgcagtaagctttaatattaattttgaattaattttaatttttgacacctcacaattctgagtcttattgtacaataaacaagtcaatatttcaagaacagaaaaaggagagcctttgcgactctcccctttcgattatcattatgcggttttgcctgtataaagctgatagtatctgcccttttgttcaagaagccgttcgtgtgaaccacgctcgatgattctgcccttttcaagaaccataatacagtctgaattcttgattgttgaaagtctgtgggcaataacaaaggttgttctgccgtgcataagcttatccatgctgtcctgaaccatcttttcggtacgggtatcaattgaacttgtagcctcatcaaggataagtgctggcggatctgcaacagcggctcttgcaatcgcaagcatctggcgctgtccctgactgagattgccgccgtcacctttgagcagggtgttgtagccgtcaggaagttttctgataaagctgtctgcattggcaagctttgccgctgcgatgacctcttcgtctgttgcgtcaagtctgccgtaacggatattttccattacggtatccgtaaacaggtgcgtatcctgtaaaactataccgagtgaacggcgaaggtcgccttttttgattttgttgatattgattccgtcataacggattttaccgtcctgaatatcatagaatcggttaataaggtttgtgattgttgttttgcctgcacctgttgaaccgacaaacgcaatcttctgaccgggttctgcgtacaaatcaatattgtgaagaacgattttatcatcagtataaccgaagtcaacatcgtccataacaagcgcacccttgagttcacgatactctgtttcgcctgttatgctgtgagtatgtttccaagcccacatacctgttttttcctcagtttcaacaagcctgtcgccctctttgcgtacattaacaagtgttacatatccgtcatcaacctcaggctcttcgtcaagaagtttaaagatacggtctgcacctgcaagcgccataacaattgagttaaactgctggctgacctgattgataggctgggtaaagctcttgttgaatgtgaggaagcttacgagtttaccgattgtaaatccgaggaagttgttgagagcaaagatacaacctacgattgcacaaagcacatagctgatgttaccgatttgtgcgttaatcggcataaggatatttgcaaacttgtttgcattgtatgaactgttgaaaagcctgtcattaagctcattgaattcttcaatgctctttttttcatggttaaatacttttacaaccttctgaccgttcatcatttcctcaatgtaaccgttagtcgcaccgaggtctgcctgctgttttgcaaaaaaccttccgcttcgtgacgcaagctgttttgttacaaaaagcattaagccaaccattacaagtgtaagaattgtaagaggaacactgagtgtaaacatactgacaagaacggctatgattgtaattccgctgttgaaaagctgaggaatactctggctgatcatctgacggagggtgtcaatatcgtttgtgtaaacgctcatgatatcgccgtgagggtgtgtgtcaaagtattttatcggaaggctttccatatgttcaaatatctgacaacgcaaatcacgcattgtaccctgtgttacataaaccataatttttgcgtagataaacgccgacgccgcaccgattgcatagaaaattgcaactcttaaaattgctccgagcatcggtccgaagtcacggctgccgctctgaatcatcggagtgatgtaatcgtcaataagattctgaataaacaatgaaccctgaacatttgcaagtacgctgatgaggatgcagacgaaaacaataatcatctgaaatttatattttttgaagataataccgaatagtcttttaagaacctgacctgaattttcaaccttttgtgcaggtcctcggtttcttcttcccattggtcccggcataattacagctctcctttcgcatcaaaatcaccgttgccgcttgtctgggcaacataaatttcattgtaaatcggactgtttttgataagttcttcgtgagtacccactgcgcttatctcaccgtcatccattacaataatcttgtctgcgtgtgaaacgcttgatacacgctgtgaaataatcagctttgtagtatcggggatattctcgctgaatgccttgcggatacttgcgtctgttgcggtatcaactgcacttgtcgaatcatcaagaataagaattttcggatttttcagcaaagctcttgcaatgcaaagacgctgtttctgaccgcccgaaacattagtaccgccctgttcgatttttgtgttgtacttatcggggaagctttcgataaacgcatctgcacacgcaagcttgcaggcattgacgcattcttcctctgtagcattttcgttgccccatctgaggttgtcaaggattgtaccgctgaaaagaacattcgactggagcacaaccgaaaccttgtcacgcagagtttcgatatcatagtcacgaacatcttttccaccgaccttaacagaaccttcggttacatcataaagtcttgcaataaggtttacaaggcttgtttttgaagaacccgtaccgccgataataccgattgtttcgcctgatttgatttttaggttgatatcgttgagaatcggtttttcggcttttgtgttgtatgagaatgaaacattgtcaaactcaatgcttccgtccttaacctcgtaaacagggttttcgggatttgcaagcgttgatttttcattaagcacacctgcaacacgcttaccgcttgcaatgctcattgtgagcattacaaacaccattgccaccataagaagattcataagaatgttcatacaatatgtgagcatacttgtaagttcacctgttgtaagctcactgcttacgatcatatttgcgccaaaccagcttacaaggatgattgatgcgtatgaagtaaccatcataatcggtgatactgttaccatggcattttcagccttaacaaaaagtctgtaaacattgtcggctgccttgcggaacttgccaacttcgtgtttttcacgaacgaaagcctttacaactctgattgaagttacattttcctgaacgcttgcgttgagttcatcgtacttttcaaaaacctgactgaaatacttgtatgttgccttcataataaaggcaagaacaacagaaagtaaaattgttgcaatgagataaatacaggcaagccttgcattgatgatgaatgtcattgccattgcacagatgagcgatacaggcgctctgaaacacattcttaaaagcatctgatatgcattctgaagatttgttacatccgttgtcatacgtgtaacaagtcctgcggttgagtaacggtcaatgttggcaaacgagaatgactggatatttgcaaacattgagcgtctgaggtttcttgcaaagcctgccgaagcttttgcaccgtagataccgcccatcatacctgcaaacaagcccgtgagtgcaagtgcacccatataaccgcccgttatgaatatgtgctgcatatcgcccttgttgataccgtcgtcaatcattgatgacataagaaacggaataattgtttcaacaattacttcgagtatcataaagaacggagtcagaacggattctttgacgaaacctttgatattttttgccaaagtttttatcatacttatctccttccgttttaatttgcattttcaagtccgctgagaattttatttataagaaaaagaaattgtttcttttcttcttttgtcagcagactgtcaagcaaagtttcgtttttggttatcatattttcgattttgtaatgaagttcaatacctgtttcggtcaagacaagttttttgagccttgcatcactttcaacgctctccctcgttatgtaatttttcttttccataagtttaagaatacttgtaacggttgaacgggcaattgaaaatgcgttttcaatatctttttgataaacatcttcatcacgatgatcatagagatatgcaataatccagccgtgcataagagtcagcttatccacacccttatccttggcggaatagattaactttctctgcaaaacctgattaagcaccttgatttcgtgaccgattgaatcattaaagcgtttgttgcacttacagctttttacgcttttgtcatcacacattatttcacctccgaaatcacacttatgagatattgttctatatagaatagttcgatacaaaacaatttgtatcagtaattatagcaccttcattttgaatgtcaagagaaattacaaataattattcaaagtttcacattgctgtcacaaatcaaaagcgacagctaaaattacagctgtcgcagttaaaatcatattcactttgcacaaattatgacaattgtcacttttttaggatttctgtcgcatcacggatatcgggggttttatcaccgttaatatcacaaacaaaaagagcatactgattttcgtcataatcgtcaaaggtcaggtctttgataagatacttctgaataagctcagcgtccttttcatctgtttttccgtcaatgttgaggtctttcatatttttgggaacgcaaccgccgtcaagtacaaaatcaataccgctgtcgttcatgagttcatcggctctgtttttgtcaacatcaacaatgtaaagtcccaatgtgtcaaagcattgataaacatactttgcatcctttaaaatctcggctttcttttcttttgccctgtcatttgttatgcctgcaccttgaagatgtgaatcaagctttgcaatcatctccattgcgtaatcgttatccgtcattgcacgctcgagatcaacaccgtttgtcatatagaaccaaccgagcgaacccataacatatagattattcacatcaagtccgcagtaaacggcaattttcccgtccttgtactgaccttttttcatcgacattttggaatagcccttgattatactgtagccgagcttcattccgtcctcgctgatatagtcaaggtcaaacgccgctgcacttgtgcatgaaaagcacgctccgccgatgagcattgcaaatacgagcaatattgaaatcacctttttagaaaattttcttttcataaaaaacacctccattggtagtatcaccgaacggaagtgttttattttgatttatttacttttatttgacttattattttttctttcttttcttatctgattaagctctgaacctttggtttttacctttcttttaaattttgcaacggtaaacgcttttatcctgtcatgatagacataattgatttccgcacaaaccataagacaaaccataagaaagtaaaaccaaatcataataacggcaattcttgtaagacctccgtacacggagaatccgttgaaatccgacacataaaccgaaataccgaacgaaagaacataccacgaaaccgtgcagagaaacgcaccgggcaactgtgacttaaagccgtattccttatgctcactgcgtgagatgttcggaaagttcctgtaaatcagcgcaaacaataccgtcagaaacaaaaagataagtatatatctgagatgatagattattccgattatgtcaggcaacgattttagatgcggtgaaagaaaatcgttaattgttgaaccgaggacaataagtacaagtgacgcaagcaaaattacaaacaatgcaattgtgtagaacatcgcccttattcttaaaaagaaccagtttctgttttcgtaagcatcataaattctgttaagaccgtttgtgattgcgtggattccctgtgccgccgaccacagagtgactacaagcgttacaagagaaattcccacagcactttcataggcagaggtcagaaagtatgttaaatcatcggcaatttttgacgaaaacacactgctgagtccgtgataaacaaaatcaatcggaatgtgcaggttctgcaaaagtgacacaaagaacattgagagcggcacagccgataatataataaagaatgccgactgtccggcaattgcaaaaatattatcgtgaacgcatttgcttgttatcggttcaaatctgcctgttattcttttgtaaagttttatcgccttgtcaacgaattttatcctcaatgtgtcacctcccctatttctatatgatatatatgataattattttataccgtttttcttcatctgcacattataagaaattctcgtgagaagtttttcgggtgcaaaatgtctgaaaaacgacaccgctttcatttcaaagccgggtgtgataatcattttgcccttcatggtcatgtcaacggcataccttgcgacaaacttcgggtcaagtcctcttatgcagaattttacatccgcaacattattgaagttggtttttacgggacccgggcaaagtacggaaaccttgacatttttattatccctacgcatttcctcatgaattgcctgagtaagacggacaacataattctttgatgcatagtagcttgcaaatgtcggtcctgcaagaaatcctgcggctgaacctacattgagaatatatccgctgtttctctccgccatatctttaagaaaaagctttgtgagaatgtgaaccgttgaaacatttgtgtgaatgagttcaagctctctttcaagcggaacatccaaaaattttccgtatgcaccgaatccggcattgttgacaagaaaatcaatctgttcattttcattcttaatatgctcatacaaatccaggctgtcactttctcgtgaaaaatcaagcgtaattaccctgacattcacatttgaaagttcctctttcagcttgttaagcttatcggttgagcgtgatacaagaataaggtcataaccgagttctgcaagatatcgggcgatttctttacctatgcccgaacttgcgcctgtaatcaaagccttcattagttttcatcatccttcggtttttgtgctgtggcacaaagccatgttgtaccttccttagtgtatgtgtttatgttttcaaagcctgccgattcaagtacggctctgatttcctgcggagttaccgacttgatattcagcatattttcaaccttttcccacttgaacggatcatcgtctgttctgagcatttcaaaaagcagcataaccgttccgccctgtttgagaacacggaaaacttcttttacatcattctccttatcaggccagaagtagtaggtttcaactgccgtgatattatcgaatgtattgtcatcaaaaggcatatcggatactgatgcctgaagaattttcgctttgttgcagagtatattttttgagttgagtttttcggaggattttaccgagagttcggaatagtcgattccgtaaaccttgccgttggcaacaattgagcaaagtcggtcaacggtttttccaccgccgcagcctatgtcaagtacagttgcggtgcgttcgatattcatatgttcaagtccccatgaggtgaggcttgaatgtcctttattcatagctttaatcatcattttgccccaaaagccgcttggctttttagcattctccaccaacttgcggtatttcataaaaatcactccaatctgaaattttcatctgtttactgtcttattatctattattttctttttcttcctgttgaattaagtttttgaagcagaagtgcaaggaaaaatgcaccgcctactataacgatgaaccaaacaaatgacatatacaacggttgattcatcacacgcaaaaacgggtatggaccgtcaaatgcaccaactatgttaagtataataagaacaatcgcatatattaatgtagggattgtagccgtgaaagctgattttgtgttaaggtgaggttctttttcaaaaagcacaaacgataaaattgtaagaatcggacacaaagtatgtaaaaaggtgaagtctttgttaaaaagcatatagagccaaccgtttacgccctctcctcgcatcggggaaagtacggcaagaactacaataaatgttaccgaaagcacagccgccgccatatatttaaacatctgaaccgagtgcggaatttcttttccgcttttgagatatcgcacctgaaagcctgccataaccgcacaggcaacaagtgcaaacaggttgctgtcctcagtgtaatatacaagcggatagcagcctattttgaaaaacacgataattattgcggcaatctcacaagcgataatcgcaagattaaatgccaaagctgtttttgttcgttttattttaagtgtattttgcatttttaatccttttctatattattttgttaatttctttcaatcaatgccacgctttccacatggctcatctgaatacgatgaatttcttggctgattttgggttcaagggaatacatccacagcctttttcgtggttctgccgtttgtggggatatgtccgtgaaactgaagttttcgcattatctatttcaatgtaaataatgctttttcataatccttaacataatacttgatattagtttttcctttttgcactacagtatgtccctcagtttcaagcattttcttttgtgcctcaattcctccgggatactttgcatttaattctccattcgcttttaatgttctccaataaggggttttatcctctgtgcgctgataactcgcccatgcaactattgaaacaaaaattccggctgtgataggctctgtaaaatcggcactgcttaactctgcaaagtattctcgtatttttccgagagtaatcactttaccatacggaatttttttcattactttgtcatagtcgattggcggtgcaaaatacattttatctccaccatattttttaatactcttttcatctgtgattatttgaaatttaggcatatccttgctatccataagcatagcattaaaatcctttttatcttcatttgccataatgtatcacctccaagccaatcatatctcaataaacagactcatgcaatgagacgcttttataatttctcgcaaaacattaaaatttccatttactcttctttcatcttttcttccagttcaagtaaatatctgtcatagtcagacataaacaatctgtcctgaatgatgcgatatttctcaaattccgtttctgcgtgaagttttgcctgctctgcacttatctttcctgctcctgtgagaatttcagtaccgttaaattcgaggaaaccgtcaagtcttttcgcccaatcctccatgctcataggaatatgacgttcggcttgtaactctgcataatcgagatacagcgatacaatacgttccaaaaaagacaattctttttcagtaagatagttttttgctacagatacatcgcttttcactattttaccatcaggagcattttcccaagaggttagtcccatatgttccttttccgcatccgctcgttcaacaatcagttccgcagcagtatgtctgtgcgtagcatagtgcattttgttctgcacagttttgaaaaagagtcttgtggtttttgcatctttatcatagtcgaaagctgttgcataaaggtctgtaaccttttggtagaattttcgctcagacaggcgaatttcacgaatgtattctaactgacggtcaaaatattcatctgtgaacatcgtgcccttcttcagacggtctacatccattgtccagccctgaatggtataatcttttacaatttgacctgcccatttacggaatcgaactgctcgttcattattaactttaaatccaactgcaataattgcctgaagattataatgttttgtttgataattcttcccgtcgtcggcagttgttaagtatttcttaataactgaattctcgactaattcgccgtcttcaaagattttttttagatgttgattgatcgcaggcacagaaacatcatacagcgttgccatcattttctgtgtgagccatatattttcgtcctcataacgcatttcaaagctatctgcctgatttcccacagaagcaacatatgtgagatattccgcagcacttgagcgaatacttatttcatttttcttctttgccattttgtgcacctccatcaaaaagcatcaccatcggtttcactttttctttttaaataagtcaattcaatatcgtaccccaaaccccaatcatatttcattttaatttgttgcactactcaataatcataataaatatgttacttttgactttcattaattacagaaccttcatcatataccttggttcatattctatatatccgtgtttcggataaaaaacataagattcaaaccactgctcctttggtgtccccaaatgtacttttgaaacagcaatgccgttttcacgcatccataactctgccgtattaagtaactttgaaccgattccctttcgttttaatgacggttttatataaagcctatgcaaaaatgcctgatctgtatcagtaattcttgaacatccaatacatccgactaccctgtcattttcatctattgcaagccaaaacatatcattgcaatcaagatagtttgccttaatatcaagaaggtcaggatttatagtaggttttctacccaaagcatcttttgcctgtaaaaccgtaaaaatcatatcatcacgatagatttcttcaaatttaataattttcacacctttactcctgtactttagtcaacagagccacgctctctacatgggaggttccggagaacatatcgcagggggtgatttctttgggggtgtagccgttttctgtgaagaattttaaatctcttgcgagggttgcggggtcacatgatacatagactacacggctcggtgacattcttgaaattgtctttacaagctcttcaccgcagccttttctcggtgggtcaagaattacgcagtcgggttttaagccttctttttcaagctgaaatgcggcatctgaggcatctccgcagatgaatcgtgcattttcaatgccgtttgcttttgcattttcatttgcatccttcacggcatcttcaacaatctccgcaccgataagctgtttacaggaatcagccattgtaagacctattgtacccgttccgcagtataaatcaagcagaatttcgtcagatttaagatttgcatattctttggctttgccgtaaagcttttcagcctgttttctgttgatctgccagaacgaaaacggtgaaattttaaactgcaatccgcaaagtgtgtcggtaatatggtcacttccgtagattgttctgttttttctgccgagaacaacattggttttttctctgttagaattaataatcacactttttaactgcggaagttcggatttgagcattttcacgagtaaatcttcctgtttaagaccgtttgcgttgacaacatagcacaccataagctcgcccgaaacctcgccaattctgatataaatgtggcgaagtcttcccttgcctgttgtttcatcataaatttccgtgttagtttttgcgataaaatcttttgtgatttcaattacccttgcaaaaatttcgggctgtaaaatacagtcggtgcaattgattatgcggtggctgtggaatgaataaaaaccagtcacaacatttccgtcacggtcaagaccgacaggatactgcgccttgttgcggtatcttgtgatattatccgacgaaattatcggcttgaaaacaacattatcaagaccgccgatgcgtgttacggcatcctcaactctttgctgttttattttgcattcttcttcataagaaatatgtcgccatgtgcaaccaccgcacttcataaagttttcgcagtcgggagtaattctcgccttggacggaacaagaatttcttcgattttgccgaaagcgtaggttttcttaacctttaatatacgcaccttgagttcgtcaccgattgcagaaccctgtacaaaaacggcaatgccgtcatctgttcttccgactccgctgccctcggcagttgccgaagttattgtaaggtttacaatatcgttcttttttaaagtcat

SEQ ID NO: 69 - DNA, 10194 bp, unidentified
  source 1..10194: mol_type = unassigned DNA
ggtgatggaggcgcccatatccacacaagagttaatggcgttgaatggggcattggctcccagcgtgtagcaaccaatgtcgctgaacaccttataagtgggatattcttctttcaatacttgggtcagcaccgtgtacatgtcgcgatggccgcaaccctcgcacaaagcgggcgggcgcatctctaccagagaaggaacgctgaattcagccttgttctccttgcctacggcacgtgccacgctgtccgggttcagctctccgtcttgtgaaagagtgccgtccaaacggccttttactttgatgccgatgcccagatagcctttcagttgtttttctacgaacggttgtccgtcttccagtaccagaatctcgtcacatgcttctaccagctgcatcagctgtttcttgggcaacgggtattgtccgattttcagtaccggatattcgcaaccttcgggatagttttccattaggtagttgtagccgatgccgcatgccacgatacccagctttttgttggggccgtcggtatatttgttgtaagcggagttttcagaagctttgataaattcgtcctggcgttgcagcaatgctttgtagcgtttgcgtgcattacccggcaggaggatgaactgacgcgggtcttcgctgaaggaaatctcattctgcggttgttgctccttgcgctctacgccggaacgggagtgtgccaggcgcgtaaccatgcgcatcaggatgggttcgccggtctgttcggagaagttgaatccgttgtacaccatgtcgtatgcttcctgctggttgcttggttcgtacatcgggatgagggagaagtcgccatagaaacggctgtcctgctcgttctgagaggaatgcatgctggggtcgtcggcagcaatgattataagaccaccttttacgccggtaatggcagagttgatgaaacagtcggcagccacgttcatacccacgtgcttcatgcacaccagtgaacgcttgcctgcaaaggacatgcccagggcagcttccattgcagttttctcgttggagcaccagcggttatggatgttcttttcggcagtaatcggtgccatctgaatatattcggtgatttccgtagaaggagtgccgggataggcatatacacccgaaagtccggcgtctaatgcagcttgtgcaatggcttcatcgccaagtaagagttgcttgctcatatctgaatatttaagtgttagtcatggattaatatttgacgcaaatataggattttgcttttattttatcagcagattacttgaaaatctttctttcgtttaatgcattccaatattttcttgcatttttcatgtgctcggcataattggatgcaaagttatgggtgcccgagaagtcctctttggcacacatgtagaggtagttgtgtttcgtatggttcagcacagcatccagcccgatgggtgaggggatgcgtatgggaccgggaggtagtccggtgttgagataggtattgtagggggattctactgccagatgggcattcgtaattctccgcaagccgaagtcctgcaaggcaaatttgatggtagggtcggcttgcagaggcatgccggtgtgcaggcggttgatgtagagccctgccaccattggtttttcgggattgttgtttgtctcttcctcgacgatggcggcgagggtgcagacttccgtcggggtcattccgatggcggtggctttgtctaagcgttcctggttccagaacttctggtgctctttttgcattctttcgaagaactcttctgcactcatgtcccaatagacttggtaggtttcggggatgaagaggcagggcagggtctctttgttgtatcccagtttttgttggaatgcggagtcgttcatcaatccggctatttcggcggagtctatcatgagctgtttgcctacgctgcgtgccagccggtccagtgtgcgtacgctgccgacggtgaggttcgtaggttcttgatatccgcggtacagacggctgaatacgtgatatacgttttcccccggccggatggcgtagcgtccggtgtgtatattttcggaatatttcttgtattgggccatccagcggaagccggtgaagcttcgaggatggccttgttgttccaccttattatatatggagtcggcggtgtcgtcgcggtctatatagatatagactgtctttttcggatggaattgcggggcaaacagatagtagtatactgttcctgcacaagctgctccaataagaatcagtgcgacgaatgttccgataatgattttcttcttttccattttgttttactgcatctttagtcgggcaaagttagtaaaaaatggagtgaaaaccatcaagtcatatcagttaattcgatagctgacgaaggctatgcgtttgctgtccggtgcccatgagttgacattgatggtgccttgtccaccgaaaagctttaacaatgtcttgggttctccaccgtttgcgggcattaggcgcagctctacgttcttgtttgccaggtgctctcccggttccaggtcacctttgtagtaggtgatgaatacaacggattttccgtcaggggagatgtgggggaaccaggagttacgggtttcgtcaaaggtcatctgggtctgttcggagccgtctgccttcatgcgccagacttgcatgagtccggtgcgtacggaattgaaccagatgtattgtccgcagggggaatattccggtccgtcatccagaccttcggcagtggtcaggcgggtttcttcacctccttccgccgggatggtatagacgtcatagttgccgtttcgttcggcgcaataggcaagctctttgccgtcggggctccagccgtggaggtagctgggagccataggtgttattaaacggggagtgccgcccgtgatgggaagtgtataaatgcgcgatttatagtcttctttcgtcccgtggctgatggctatctgctgtccgtcggtcgagaggacgtggtcgttgttgcagttttgggcaaatccggtgtttatcagttccggttcggcaggcgaggtgggggaaaggcggtaaagctttccgtcgttgttgtatagcagccattgcccgtcgggcgtccaattgggagcttcaatccggtagggaaattcttttacgacagtccggttaccgttggttacatccagtatttcgaggacgctggtaatctcgtttttttgttgagcggttgcggtcagtgcaacagttgcaaagaaggggattagatagggtttcatgttcatatcgtatttaataaatctccgcaagatacattttttattggaaactacatagtcggagcatgcttttttcagagagaatctgtagtgatggtcgaatgcgtagtgcttatcatatgaatagtctccgggattcttgaaatagttgtccacatactgccagttgtcggtgtcgagcggcgtgtgcgaagtcatgtacgatagggagcttttatctctactatctcgctgtccagactaatcaggtctttgcccaagcggacaatgcgggcatcttcgggcatgtagtcggtgccgacttccccctttccgcctccaccgaatgacaaccatcctgtaccttcgtcatctatcacggcacccgggtcgaaaggagccctgcagtggcctaatccttgggtgaactggctcaccagcatacgtcttaccgtccgattccacccgcgatacgatggatggcgcccatgaggctataccccatggcgagagggcctttacgtcaatcagtccgtgataagtccaatttaccatgtcatcggtggacagcatgaccagtgaatgggatgtattggtatgtgtttttgccgtattttcccacactgtccagttgctgggtgtcattggttccatacacatagagccttccgttgtattccaccgatgtcgggtcggccacaaaaatgaaatccaacagcgggttggcgtttccactgaagaattggggtgattctaccggacgcgtgtctttctttcttgaatcggaaagcgcccacacatcatttcctgcggatatagctgccagcagcaaagccgctgtaaataacttgattctttccatttttttatagtatgttatagaaacctatggtagccttttgattttggcttgtgttcttcaatcacctcaatcctttatttaagattgaaaaatcgggttattgaaaagttgccgcaaatattgggaattactatgtataatataaggtgtattatgtttttaataatgtgcctatatgtttcaagttatcattgtaatcagatggtgctgttttaaactagctttacttgctttgggataattatgcggctatggattaaactgtttggaagggcattgtgttttatgcaaatatattcgtagaagagcgttttttattctaacaattcttgaaaagaaaaagcactgattattccagataatcagtgcttgaatatcgagccgctagccagacttgaactggcgacctacgcgttacgaatgcgttgctctaccaactgagctatagcggcaataagcttttgtttacggggtgcaaaggtacatctttatttgaaaaggcaaaaagaatctctgttttttttagaaatattttagtgggataattttctatttgaatgtcctgaactttattgccataaaaattggataataaaacgaaaagaagcatctttgtcgtaggtcctatagcaaataagtctgatactgattatgaatttaagaatctattataaatatctttcttcacgcatagcgtccaaatggacggtgttgttggtagatgtaattatcgttgtgatttccatgctttctgcatgttttttgcaatataggctttcgtccgtatcttatgaaatttctttgtatgtatggctgaccattttggctgtcttgtgtaatgtctgtttctttcatattctccgtacttatgtgggtgttatccgtttttcctcttttgtggatatttatcgtgtgctttggagtcttacgataagctatgctgtactgtttttagggaattactgttggtctgtttcggggcttggagaaactttgccgaacagcattctgtttatggcatatatgttcaccttctctctgatggcttgtatgcgcattgctgtgaagatgctttatgaagctattgcttttgatgcacgtcattgcgtgaatgtttttatttatggattccatgggactggagtcaatgttgcaaaatccttgagagttagtcgtaataatcattatcgcctgcgtggctttatttcggacgaacctgatatgataggtaaacatacgatgggatgcagggtatatcccaatgatgagcagctgtttgaccgtctaaagaaaaagaaagtggatacaatcattatctctccaagcaaggtgtcggatttggaaaattccggaatgctggataaactgttctctcatgatattcatgtaatgaccgttcctcccttaagcgattgtatggacgatggactgataaaggacattcaaatagaagattggctccgtagagaaccggtacaagttgacgtgcgtaaaattacggcccatatcgaggggcgtagagtaatggttacgggagcggcgggagctgtaggaagggaaatcgtccgccagttggctacactgaatccttatcagttgattctggtagatcaggcagaatccccattgtatgatgtacagttggaattgtctgatcattggaagaatctggaggtccgtgtattggttgcagatgttgctaaccgtacgcgtttggaggctatatttgaagaaacacgtcctcaacttgtttttcattctgctgcttataagcatgtacaactgatggatgattttgtgtcggaggcaattcaaacgaatatatcggggacagtgaatattgcagacctggcggtaaagtatagagtgtcccgtatggttatgatatctgctgctaatgcacgtcatccggaaaatgctatggaatatagtaagcgtgtggcggaaatatatgtgcagtcatctgattgcaggttgaaacgcgacaaaggggaaactgatatgttcatagtacgtttgggtgaggtgtatccgacgaatactcattgtttgattaccatgtctgaagcttgtatgctcaccctggaagtgggagtcatgggggatgggggagaagtgtacattgtgggagggcctggggatggacttttggattctgtaatcagtgaaaagataaagcgtgaaaagccatctgttgatgattatgaacatgtgcgggaagaagtgctggccttggtgcaatatagttatactgaaaaaaaggctattttgattggactaatgaaaaaaatagtgccaattttcccgctttcttctacccaatgaaaagacgtgaaagtgacagctttttaatgctttttctgaaacttagaggtggaataaatgtatattataaaaataatatattacctttgtgcccgatttatatttattacaagaactcaaaagattaatcagaatatcttatgcgtagattaataacactattctttttggtatttactttgtcaggggtagcttttgctcagcagatgtcagatgatcaggttgttcagtatgtaaaaagcgctcagcagatgggcaaaaatcaaaagcagattactactgaattaatgcggcggggagtgacaaaggaacaagttgaaagaattcagaaaaagtatgaaaactctaaatctggaagtccgcagagcaatacccaagatgagaagcgttctcgtcaacgtggtgaaatgagtggcgtagtcaaagggctgcgtacaacttcggaaacttattctgccagacaaacggatgttgcaggggattctttacaaatgatggataatcgttccttgtctcaagagaaggaaacagaggatccgacttcgcaaatttatggtcataatatttttactaacgataatttgactttcgaacccaatgtgaatgttgctactcccgagaattatcgtctggggcctggtgacgaggtgattattgatgtgtggggagcttctgaaacaacgattcgacaaacaatctctccggaaggaagtattcttgtgaataatttaggaccggtttatctgagtggcaaaactgtaaaggaagccaataattatttgaaacaagaatttgccagaatatattccggagtaaccggaaatgttccgtctacccaagttaaactgacattaggagaaatacgttctattcaagtaaacgttatgggtgaagttgtggtgcccggaacttataccctctcatcatttgcttccgtatttcatgctttatatcgtgcaggtggtgtgaacccgattggtagtttgcgcagtattaaagtgattcgcaatggaaatacaatagcggatttggatgtttacgatttacttatgaaaggaaaaatgaaggatgacatccgtctgcaggatggtgatgtaattcttgtggatccttaccagtcactggtacagatattaggtaaggtaaaacgtccgatgttttatgaaatgaaacccactgaaaccgtaggtacattattgaagtattcaggtggttttacgggtgatgcttataagaaagcattacgtataatccgtaaaagtggacgtgagcatcaaatttataatgtggatgagatggattattccgtattccgcgtagatgacggtgataagataacggttgattccgttttacagcgttttgagaatcgtgtggaaatccgcggtgctgtatatcgtgaaggtttgtatcagttggacggtacgatgaatacagtgaagcagctgattaagaaagcggaaggacttcgcggagatgcattcttaaaccgtgctataatcgatcgtgaacttgaagacttgtcgcatgaggttatacaagtagatgtgaaaggtttgctgaacgggacggctgcagatattcctttgcagaagaatgacattttatatattccaagtattcatgacttgaaggaagaagctacacttaccattcatggtgaagttgccaatccgggtacatatctctattctgataaaatgacagtagaggatttggtgttgcaggctggtggcttgttggaggcggcggctacaacaaaggttgaagttgcacggcgcatgaaagatccgaagagtacatctttcagtactacagtaggccagaatttctcttttgatttgaaagatggcttattggtgggagaaggaagccaggatttccatcttgaaccttttgatgaagtttatattcgtaagagtccgtcttattttaaacaacagaatgttatggtgggaggagaagttctttttagcggtaattatgcactatcgaaaaaaaatgaacgtttgagtgacttgatagctaaggctggtggagtgactcccgatgcttatataaaaggagcgcgtcttatacgtaggatgaccgaagaagaattccgccgtaaggaagatgctctgcgtatggcgcaagcgggaggcggagattccatatctgtaaaaagattggatttgtccgatacctattctgtaggtataaatctgggagaggccttgaaaaatcctggttcagatgctgatatggtgcttcgcgagggagatgtattatttgttccggagtacgtaagtacagtgaaaatcaacggtgctgtaatgtatccgaatacagttttatataaaaagggtgaaagcttgaaatattacatcaatcaagctggtggttttggtaatgatgccaagaaacgtaaggtctatgtaatatacatgaatggtacagtttctcgtttaaaagcagggaacaagaaagccattgaacctggttgtgaaataattgttccaagtaaagaacagaaaaagaagatgactactgctgaaattctgggaatgggaagtacgacagcttctattgcagcgatgattgcgactatggttaatctctttaagtaatttgaattatgagcgaagaaagaatacaaaacataacctctccacaacctgaggaacaagaaatagatttgatagaactggcccagaaagtatgggctagtcgcaaattggtttttaaggcgtgtggtatcgctgctcttgtaggactggttgttgcatttagtattcctaaggagtactctacaagtgtgacattggctccggagagtggtggcaaatctggtggtggaagtatgggagcccttgcagccatggcgggtatcaatttgggcacttcttctggtgaggatgctttgtcacccgaactttatcctgatattgtaagttctactccttttctgattgaactgttcgatgttaaagtcaaggatcagaaagcaaaagtagacacgactttatatgcttatttgaaagaagaacagcgttctccttggtggagtgcaattttctccgctccttttaaggtgttaggatggacattgtctttgtttaaggatgaaccggaagagggggacgcaaagctggatccttttcgtcttactagagatgagtctgccattgcagatgctttaagtaaacgtatctctgtttccgtagacaaaaagacaggtgtgacaaccttgtctgttactatgcaggatcctttgatatctgcttcgctgacggataccgtgatgcattgcctgcagaactacatcacagattatcggactaataaggctcgtcatgatttggcatttaccgaaaaactttatggagaagcaaaggccagttatgaggatgcccagaagaaatacgcaaattttgtagatgcaaaccagaatataatattactgagttatcgcgcagagcaagagcgtttacagaatgaaatgaatttagcctatcaagtatatacacaagtgtctcaacaattgcagatggcaagagctaaggtgcaggagattacaccggtatatacggttgtccagccggctacggtacctttgaagcctgcaaagcccaataaattgatgattttgatcggcttcatgttcttggcaggtgtcggcagtgtgggatggatattatttgtaaaagatttattaaagggatggaaaaagcaaacaatatga

SEQ ID NO: 70 - DNA, 5614 bp, unidentified
  source 1..5614: mol_type = unassigned DNA
  misc_difference 1132: note = a, c, g, or t
  misc_difference 1133: note = a, c, g, or t
  misc_difference 1134: note = a, c, g, or t
  misc_difference 1135: note = a, c, g, or t
  misc_difference 1136: note = a, c, g, or t
  misc_difference 1137: note = a, c, g, or t
  misc_difference 1138: note = a, c, g, or t
  misc_difference 1139: note = a, c, g, or t
  misc_difference 1140: note = a, c, g, or t
  misc_difference 1141: note = a, c, g, or t
  misc_difference 1142: note = a, c, g, or t
  misc_difference 1143: note = a, c, g, or t
  misc_difference 1144: note = a, c, g, or t
  misc_difference 1145: note = a, c, g, or t
  misc_difference 1146: note = a, c, g, or t
  misc_difference 1147: note = a, c, g, or t
  misc_difference 1148: note = a, c, g, or t
  misc_difference 1149: note = a, c, g, or t
  misc_difference 1150: note = a, c, g, or t
  misc_difference 1151: note = a, c, g, or t
  misc_difference 1152: note = a, c, g, or t
  misc_difference 1153: note = a, c, g, or t
  misc_difference 1154: note = a, c, g, or t
  misc_difference 1155: note = a, c, g, or t
  misc_difference 1156: note = a, c, g, or t
  misc_difference 1157: note = a, c, g, or t
  misc_difference 1158: note = a, c, g, or t
  misc_difference 1159: note = a, c, g, or t
  misc_difference 1160: note = a, c, g, or t
  misc_difference 1161: note = a, c, g, or t
  misc_difference 1162: note = a, c, g, or t
  misc_difference 1163: note = a, c, g, or t
  misc_difference 1164: note = a, c, g, or t
  misc_difference 1165: note = a, c, g, or t
  misc_difference 1166: note = a, c, g, or t
  misc_difference 1167: note = a, c, g, or t
  misc_difference 1168: note = a, c, g, or t
  misc_difference 1169: note = a, c, g, or t
  misc_difference 1170: note = a, c, g, or t
  misc_difference 1171: note = a, c, g, or t
  misc_difference 1172: note = a, c, g, or t
  misc_difference 1173: note = a, c, g, or t
  misc_difference 1174: note = a, c, g, or t
  misc_difference 1175: note = a, c, g, or t
  misc_difference 1176: note = a, c, g, or t
  misc_difference 1177: note = a, c, g, or t
  misc_difference 1178: note = a, c, g, or t
  misc_difference 1179: note = a, c, g, or t
  misc_difference 1180: note = a, c, g, or t
  misc_difference 1181: note = a, c, g, or t
  misc_difference 1182: note = a, c, g, or t
  misc_difference 1183: note = a, c, g, or t
  misc_difference 1184: note = a, c, g, or t
  misc_difference 1185: note = a, c, g, or t
  misc_difference 1186: note = a, c, g, or t
  misc_difference 1187: note = a, c, g, or t
  misc_difference 1188: note = a, c, g, or t
  misc_difference 1189: note = a, c, g, or t
  misc_difference 1190: note = a, c, g, or t
  misc_difference 1191: note = a, c, g, or t
  misc_difference 1192: note = a, c, g, or t
  misc_difference 1193: note = a, c, g, or t
  misc_difference 1194: note = a, c, g, or t
  misc_difference 1195: note = a, c, g, or t
  misc_difference 1196: note = a, c, g, or t
  misc_difference 1197: note = a, c, g, or t
  misc_difference 1198: note = a, c, g, or t
  misc_difference 1199: note = a, c, g, or t
  misc_difference 1200: note = a, c, g, or t
  misc_difference 1201: note = a, c, g, or t
  misc_difference 1202: note = a, c, g, or t
  misc_difference 1203: note = a, c, g, or t
  misc_difference 1204: note = a, c, g, or t
  misc_difference 1205: note = a, c, g, or t
  misc_difference 1206: note = a, c, g, or t
  misc_difference 1207: note = a, c, g, or t
  misc_difference 1208: note = a, c, g, or t
  misc_difference 1209: note = a, c, g, or t
  misc_difference 1210: note = a, c, g, or t
  misc_difference 1211: note = a, c, g, or t
  misc_difference 1212: note = a, c, g, or t
  misc_difference 1213: note = a, c, g, or t
  misc_difference 1214: note = a, c, g, or t
  misc_difference 1215: note = a, c, g, or t
  misc_difference 1216: note = a, c, g, or t
  misc_difference 1217: note = a, c, g, or t
  misc_difference 1218: note = a, c, g, or t
  misc_difference 1219: note = a, c, g, or t
  misc_difference 1220: note = a, c, g, or t
  misc_difference 1221: note = a, c, g, or t
  misc_difference 1222: note = a, c, g, or t
  misc_difference 1223: note = a, c, g, or t
  misc_difference 1224: note = a, c, g, or t
  misc_difference 1225: note = a, c, g, or t
  misc_difference 1226: note = a, c, g, or t
  misc_difference 1227: note = a, c, g, or t
  misc_difference 1228: note = a, c, g, or t
  misc_difference 1229: note = a, c, g, or t
  misc_difference 1230: note = a, c, g, or t
  misc_difference 1231: note = a, c, g, or t
ttaagcccagagattttccgggtaaaggccgtcggccgtctttttggcgatggcttccaccaccacgggtttatcctcgcggtaggtgacgccataccacttatcggtgctgcgcagcaccttgacggcggctttcttttcgccgatgagctcactgaccaccagcggcaggaaatactcgcacttgagcgggttcttttccagattctcgtccagccagcgggcaaagcgccggtcggcttccttcacgaagctctcgccgaagccccagaggttcatgctcacgggcgtctcgccgggcaggtccgtccagctctcgccgccgtcctcggtgtagtggatgccaccctcataggtctcgatgcgggtgcgctcggtgacgctgtggagggtgctgtcctcgttgagggcgcagacgccgcgggcgacgctgccattttcggaaacggtgttcttgagcaggtagctcaccatgcagtagtcgtagacctcgccgtcggtgtgagtggagaggtaatcgtagatgaccttgaatgcctcggggccgtagtagtcgtcggcattgatgacggcgaaggggccgtggatgtagggctttgcggccagcaccgcgtggcaggtaccccagggcttcacgcggccctcggggatggtgtagccctcgggcagctcatccagctgctggaaggcgtacttcacgtccatcaccctggacacgcggtcgccgatggcagctttgaaagcctcctcgatctcgtgcttgatgacgaagatgaccgtctcgaagcctgcgcggcgggcgtcgtacagggaataatccacgatgacctgaccgcagggacccaccgggtcgatctgcttcatgccgccgtagcggctgcccatgccggcagccatgaccaccaggaccggtttgttcatgttttatctcctccttgaaaagggtgtttctcttttacggttttattatactccaaaccacgccgggcaacaagacaaagctgttttttgaagtttggcaagtttttattgcatatatcagcaagtaaatattgccttttgtttccagaccgagtataataacttcatccgacacaaaaacgaccggccagccgcttttgcaggccgaagnnnnnnnnnnnnnnnnnnnnnnnnnnnnnnnnnnnnnnnnnnnnnnnnnnnnnnnnnnnnnnnnnnnnnnnnnnnnnnnnnnnnnnnnnnnnnnnnnnnnataataacttcatccgacacaaaaacgaccggccagccgcttttgcaggccgaagcaagaaagtgagtttttccatgaacgaaactgtgaccaagcgtttcctgctctacttccgcctgatgatggtagcgtggatcctgatcgccaacgcctttttccacgccatcgagtttgaatacagctggctcgtctttttgagcaacatcatgctctttacgatggagggcgacatcaaagaccgctttatcagcgtggagctgggcggcctcgtgggcatggtgctcacggtgctggcgatgctggccatcggtgcgctgacgcctgttctgggcgggatgctgggcctgctgctgccgctgggcgtggtgctcttcatcctcatcatcctgcacccctacgcccccaaggtgctgaacaatgtgggctttgcctacctgaccgtcgcctgcatcgacagcgcagcttttgcagcgaatctgcctctcttcttcggggtgtacatcgtcggctctctggtcttcaacggcggctgcgtgctgctcatgaagccggcccgttatctggccgcccggagcatcaagaacgacgtcaaggctgacgcctgaatctgagcttctcgtcttttcttcttttttctcacagcgccccggcagcaaagatgccggggcgctgcacttttatgtggattctgccgtttttccgtgctacaatggggtaaactgaacgaaaggaagtttcccgccatgtatgctgcatctcctgcacgctactccactctgccctaccaccgctgcggcaaaagcggcctgatgctgcccgccgtctcgctgggcctgtggcacaacttcggcgataccgcgaacttcgagaacatgcgcctgctctgccgcacggcgttcgacaacggcatcacccacttcgacctcgccaacaactacggccccgagccgggcagcgccgagaagaacttcggccgcatcctcaaggaagatcttgccccctaccgcgatgagctcctcatcagcaccaaggcgggctacaccatgtgggaagggccttacggtgactggggaagccggaaatacctgctggccagcctcgaccagagcctgaagcggatgggcctcgagtatgtggacatcttctaccaccaccggatggaccccaacaccccgctggaagagaccatgggcgctctggcgcaggcggtgcgcagcggcaaggcgctttatgccggcctgtccaactacaacggtgagacgctggaaaaagcctgcgccatcctcgacgagttccacgtccccttcgtcatcaaccagaaccgctactccatctttgaccgcaccatcgagcagaacggcctgaaagagactgctgtccggctgaacaagagcattatcgccttcagcccgctggcgcagggtctgctgaccaaccgctacctcaacggcatcccggaggacagccgcatccgcaccgatggccgtttcctgaaagagagcgtcatcaccgaggaaaagctggcacagatacgcgctctgaacgaaatcgccgccgcccgcggccagacgctggccgagatggcgctggcgtggatactgcgggacggcaaggtgacgagcgtcctcatcggcgcgtccaagccccagcagattctcgacaacatcgctgccctgaacaacaccaccttcaccgctgacgagctggaagccatcgataaggcttccggattttacaaggagtaatttatgtccaaaactgtatggataaccggagcttcttccggcattggccgggagtttgcccgccggtatgcccgcctcggcttccggctcatcctcaccgcccgccgcaccgaccgactcgaagctctggccgcagagctcaccgcgaagcacagcaccttctgccgcatcctgcctgctgatttggagcaggagagcgagtgcgcccgtctctgcgaggcgctgactgacgagcgcatcgatattttcatcaacaacgccggcttcggcgtctgcggcagctttcttgagaccagcggcgagaaagagctctccatggcgaaggtcaatgtgctggccatgcaccagctgttcaagttcgccgtgaaaaagatggaggctcagggcttcggcaccgtgctcaacgtggcgtcctccgccgggctgctgccgggcggaccctatatggcgggctactacgccaccaaagcgtatgttgtcagcctgacccggggcgtggccgaagaactgcgggagcagcacagcccggtctacgtctgcgccctctgccccggcccggtggacaccgagttcaacgagcgggccgatgtggtgttcgcactgcggggcatcagcccggaactctgcgtggaggaggccatgcgggggatgctccgccacaagaccatcatcgtcccgtcggccctcatgcgggcggcgacgacggcccagcggttcatgccgatggcgatcttaatgcccatcatggcccaccagcagaagaaaaaactgggctgaagggctattgtgtgcaacaagcagcaatcccggcctttgcagagtccgtttttatgacgatttcacgaaaacgcagcaaaatgagaaaaaatttgcagtaattatgccaagaaaacaccttgacagtcggaataaagaatgctactctagtatacaagagggtgcagggccggacagtccaaatcgttgcttcccgtggcggcagttggactacaggtatcgtccggcagcgcagcgccccgcaaagcaaaattctgattggaggacttaattatggcacagtgtactcccaaatcctttgacctgaccggcaaggtcgcgctcatcaccggcgcatcttacggcatcggcatggctatcgcaaaggcaatggccgcaaacggcgctaccatcgtcttcaacgacatcaagcaggagctggtcgataagggcctcgccgcttatgaagaagctggcatcaaggctcacggctatgtctgcgacgtcaccgatgaggacgccgtgaacgccatggtcgcaaagatcaccgaggaagtcggccatatcaacattctggtcaacaacgccggcatcatcaagcgcatccccatgaccgagatgaccgctgctcagttccgtcaggtcatcgatgttgacctgaacgctccgttcatcgtcgccaaggctgttatccccgacatgatcgctcagggcggcggcaagatcatcaacatctgctccatgatgagcgagctgggccgtgagaccgtctccgcctacgctgcagccaagggcggcctgaagatgctgaccaagaacatcgcctccgagtacggcgagtacaacatccagtgcaacggcatcggacccggctacatcgctaccccgcagaccgcacctctgcgcgagcgtcagcccgacggcagccgtcatcccttcgacagcttcatcgtcgccaagacccccgcaggccgctggggcgaggctgaggatctgggcggacccgctgtcttcctggcttctgccgcttccgacttcgtcaacggcctcatcctgtacgttgacggcggcatcctggcttacatcggcaagcagccgcagtaagtttttccatatccggcatttttgcgccgtgtccgctgccttccgggtgccgggcacggcgctcttttgtttcccatatcgactttttttccggaatctgctacactggtcataataataaaaacaggaggactttcccatgaagatcgcacttatcaacgagaacagtcaggccgcaaagaacggcatcatcgaggccgctctgaagaaggtcgtagagccgatgggccacgaggtggtcaactacggcatgtacgctgccgatgacgccgcacagctgacctatgtgcagtgcggcatcctcgccgccatcctgctcaacagcggcgctgccgactacgtcatcaccggctgcggcaccggcgagggtgccatgctggccctgaacagcttccccggcgtcatctgcggccatgtggaggaccccgtggacgcctacaccttcgcccacgtcaacgacggcaatgccgtcgccatgcctttcgctaagggcttcggctggggcggtgagctgaacctcgagtactgctttgagaagctgttcggcttcggccacggtcagggctatcccaaggagcgcgtcgaacccgagcagcgcaacaagaagatcctcgacggcgtccgcgccgccaccttcaagcccctcatcgagtgcctcaagagcatcgatcaggacctgctgaagggtgccatcgccggtgagaagttcagcgagctgttcttcgcctcctgcaaggacgaggagctggccgcttatatcaagagcctgctggcttga

SEQ ID NO: 71 - DNA, 15883 bp, unidentified
  source 1..15883: mol_type = unassigned DNA
gtgtttatgatgcagtcagaacgtttcagtgaagaagtcaaaagtttattggaagccagtcagcagcaagctgtcatgaactataaccaagaggtgggaaccgtccatctcctgtcagccatgatgagcgaacctgatagtttcctccattatgtcttaaagagccttcatatcgaggaaaacgacttcagtcgtgaccttgaccatttggtgaaggccgtcccgtctgtgaagggaacggaccagcttagtatgtccacggggatggcaagggtctttgccctcgcggaaaaagcagccggccaaaataagattaccggagcccatctgctggctgccctctgtgaagatggcgatagcgatgtggtttccctctgccgcaagtacggcattacccgttcggccatccgtggtctcgtcgaccgctatgaaggcggcaaggacagtgacgaaaaccgcaagaccttggaaaaatatgggcaggatctgacggctaaggcccgcaagggagcccttgatccggtcattggtcgtgacgatgagatccgccgtaccgttgagatcctgtctcgtcggaaaaagaacaaccctgtcctcattggggaaccgggtgttggcaagacggctattgtagaaggccttgcccgccggatcgtggcaggcgacgtgcctgaatccttaaagaacaagaccctctatgccctggatcttgcgtcccttgttgctggggccaagtaccgcggtgaatttgaagaacgcttgaagaaagtcctcaagattgttgccgattcggctggacagatcatcatgttcatcgatgaactccataccgtcgttggagccggtgcctccgaagggtccatggatgccggaaatatcctgaaaccgatgctggcccgcggtgaactccgctgtattggggccacgacccttaatgagtatcgaaagtatattgaaaaagacagtgccttggaacgccggttccagcctgtccttgtcaaggaaccaagtgtcgaggatacggtttccatcctgcgtggcttgaaggaacggtacgaagtccatcatggggtccgcatcaaggattctgcccttgtagctgcggctgcgctttcaaaccgctatatcagtgaacgcttcctgccggataaggctatcgacctcgtcgatgaagcggcagcccgtctgcgtacggaaattgattccatgccgacggaactggatgaaagccgccgccgtatgcttcagctccagattgaggaacaggccctttccaaagaagaagataagcagtcggctgaccgtctcgaaaagatccgtgaggaactgaaagagatgaaagcaaagaacgataagatgacagctcgctggcaggaagaaaaggctggcattgccaaggttcgccaggtcaaaaaagccattgaccaggtgaagaaggacatggaaacggccgagcacgactatgatctcaacaagcttgccgaactcaagtatggccgtctgccggaactgcagaaacagctccaggaactggaaaaagaagagcatgcagaagaccgtcttctcaaggaagaagtcgacgaagacgatatcgccaaagtcgtcagcacctggacggggatccctgtgagccgccttatggaaggcgaaaagaagaaactggctcacctggatgaaatcctccatcagcgggtcatcggtcaggatgaagctgtgaaggctgtctccgaagccgttatccgcgctcgtgctggtatcaaggatcccaataagcccattggttcctttatcttcctgggcccaacgggcgtcggcaagacggaacttgccaagagccttgccgaagtgctcttcaacgatgaaaagagcatcatccgcatcgatatgagtgaatatatggaaaagcataccgtaagccgcttgattggtgcgcctccgggatatgtaggctatgaagaagggggtcagctcacggaagccgtgcgccgtcatccttattcggttatcctttttgatgaaatcgaaaaagctcatgccgacgtcttcaacgtgctcctccaggtccttgatgatggccgcctgactgatggccagggccgtgtcatcgacttcaagaataccctcatcatcatgacgagcaaccttggatcccatgaaatcatggaacataaaggtgaaatcagccatgaagaagtgcgcagtatgctgatgaagttcttccgtccggaattcctgaaccgtgtggatgacattgttgtcttcaaaccgctcggcgaggatcagatccgcagcattgtccgcctcattctgggtcagctgggcaaacgcctgcaaagtcagatggaactcacccttgaggccactgatgaagctgtcgatgcccttgccaaggaaggcttcgatcctgcctttggcgctcgtccgttaaagcgcctcatcgttcatagtgtggaaaccatcgtcagccagaagattgtccaaggagacattgtaagcggcgatcatctgaaagtcgtcttgaaaaacggtaaaattgacgtggtaaaggcgtaagccttgactgctgggaaggaccccttcttcccagcatttttacgtttattgggattttttgggaaaaacctttgtgaactcgtcgtaaatgagttcacagagtaggggttccgttgtataataagaaggaatttgatgaatcgccaaggaggatttccatgaaaaaattactcacccttgtcacgcttcttatgacgctccttgccgttccttttacggcaagtgctgagcgcagcggcgccaaagcaagcggcgttcctttcaataagaccaaggttgtctatctaaaaagtctcgaaaagactgatggggaatttgttaagaataacccccaattcagacgcgatgaggatgcggtccgcctcacctatcttgggctccagaaatccttgaaggatgaaggggtgacgctttataacaatccagtcatgctgcccgaccgttacctgagaaagaccctgaccatgcaggtcgttgtcaattttgcagggactgtgcccctcgaaggagaagcggctcaggaagccatcaaggacaaacgggaaccggtggaatcccttgtctccctttccttccttgtcaccaaaggagaggcaccggtctaccgtatgaccgacgtgcgtacgagtaaggaaaagaacttggaaaaactcatccgggatatgacaaaagatgtagcaaatgaaatcacgaataatcgtatgaaactaaaagatgtaaaataagaacgccgagaggctgtgagaaatgagtacatcatttctcacagcctctttttgtatggcttgggagtgggggattatgatgttcaggtggtgtgatgctgtgatgcagggccgcactgctgttctgccactaaaatcggtgcagccgaatcttttgtctttggaatttgaatccatcaaaagactgtacagccgaccctaaaccgttccttctttaaagggggagggaccgaatccattcgcccggaaacatggccctgcgcccttgtgctttgccccaatgcgggcttgggactcgggcatatttgccttgctagctgcttgcaaggaaacgtcgctgcggtttctcatccaccaccgaaatcgggaaatccgaattggataaccgtatggatatttcccacacaacatgagtgctaataaattatattatcggccccgtcgtacacgaaaacggttcctttacctccgcagctgcaatggatttatactggtgcggctgtcaaaggcggggtatcgttttcgagtcaatgcggaagatggctatagaggatcagccgtatcatgttccgtctttttgactacgcagatgggccgatatgggcttcaggcgaatcatgtttcctttaaaaaccgaaaaaattccaagaagtggcccatccgccgaaggcatttttttgggcgtcttaaaaatgagattgtggtacgtaccttcttgcgacggggcatgtcatcatcggcatcagatcaatctttttaaagccaatgacgacacgtagccgcatcgaatcggcgcgatttccgcgccgagtaaaactacagacctctacccttgcgacaaacccatttaaaagatataattctatgagtatcatcgtgagaccagcccggttatccgccctgtgtcccccttgaggaaaggatggacgatatctatgccgatacctcttgctctttgggctgctgccggaatcggagcagcgggcatgaagctctacatgaacctgaacagtcctgaaaccgtcgtgcgcaatgcaacggagcgttataacgaagaacgctataaattctataaacaaatggaaaggctcgttcccctcatcgaggaattgggccgtttgaagttatctacgtggtccaagtataccgcgatgtttgacacgctggataagctcatcaacctccccggtcattatacctataagagccacaagaacctccacatgctgccccaggatgtgcgcaagctgcggaaggtggcagacgtcgtaaaacgaatccatacggatcatcttgatattgaagggacagggatgctgactattgttgcccttcaaggcggggcggccagtgattacagccagacggccctggccgaaggggagtcgcgcctcattctcgaacaaatcatggagcagcccctttatacgtcagaatgcggcgtccttgacgaagagcaggtcctgtgcgccgtcatggattttcccaaagtcatgccccgtggttatttcaaggaccgtcatggcagaaagcgggaacgcaaggtttccaaacgggcggcccgccgctacaaggaattgacggataaggaatcggtccgtcttgctgacgcgacggcgcgggctgatcgcctttttcatgttgtgacccatgtcctgggctatatgaagccgctcaaaaaggaacatgatgaacagcttgatttttttacggccctcatcaagaaaaacaacgattacgatcagtttacgctcgaacagaaggatcgtctcaattttggcgttaccttaggatttgtcctgcgtgaactggcccggaccgatatcatcatcaagaacgggaatgttcccatcatcaatacttcggccctgcgggcggtttatgcccgggccaaagatttgatgcctgcggaagaaatgccctatcagatataagaaaggaagaattctatgatcagtacaaaaggtttcaaagcctatgatatccgcggcgtcgttcccagcgatgtcaatgaggaacttgcttacgccttgggccgcagtcttgccttttacctcaaggcaaagacccttgtcataggtcacgacatccgtctgagcgggcccagcctgcgcgacgccgctgtacgtgggatgcgtgacatggggacacatgtcatcgatcttggtcagtgcggtacggaaatgatttattttgcggttgcccatcttaaggctgatggcggcatgatgattacagcaagccataatcctgccgaatataacgggatgaagcttgtccgcagcgagtcccggcccatttcgggagacacgggattaaaggaccttgcggccatggtcacagatcctgattttgaaacaaaatatcccaaagccgcacggcagggaagctatgagcaggtggacattgtcccaagttatgtggatcatctccttagctatatcgacactaaagagattgctcccctaaacatcgtggctaaccccggaaatggcggagccggtcccattgtaaaggaactggcaaaacacctgccctgtcactttacgtatcttaatgacacgccggacggacatttccccaatggagttcctaatccgctccttgttgaaaaccgtgatgccaccagcgacgctgtccgccgggaaggggccgatcttggcattgcctgggacggggattttgaccgctgcttcttctttgatgaaaatggacgcttcatcgaagggtattatcttgtcggtctttttgcctcttacttcctcaagaagcatcccggtgccaagatcctctttgacccgcgcttgatctggaatacagaggacatcattgcccgtgaagggggctatcctgtccgctgcaagagcggtcatgccttcatcaaggaatgtatgcgtcgggaacatgttctttatggcggagaaatgagtgcccatcactatttcgccgatttttcctactgcgacagcgggatgattccttggcttcttgtcatttctctcatgtcgacatcaggccttagtcttgctgaaatggtggacgctcgcatccgcgaatatccctgcagcggagaaatcaaccgcaaagtggggaatgccgatgccatcatggaatccctgtcgacgcgctttaaatccggcatccaggaccgtatggacgggcttagcgtcgtctatgatgaatggcgcttcaaccttcgtaaatccaatacggaacctgtggtgcgtctcaatgttgaaacaagaggagatcgggaacttctcgaacaaaagacccgtgaacttctggaccttatccagggcgagaaagcataaggaggcagcagtatgaacgttcttgttacgggcggggccggttacatcggttcccatgtcattgatgatctcatcaaatctggttatacaccgattgtttatgataatttcagtaccagtcatgccgaagcggttcccgaaacggtacagcttatccaaggggaccttcacgatttcaccttcttgaagcatatcatgggccaatatgaaatcgatgccgtcctgcactttgctgcaagttcccaggtcggcgagtccatggtcgatccgggaaaatattactataacaatgtggctggtactttgggtcttcttgacgccatgcgggaaagcggcgtcgagtatatcgtcttttcgtcgacggcggccgtttacggggaaccggaccaggttcctattacggaagacatgccccttcatccaacgaattcctatggccggacaaaactcatgattgaaaacatgctgcgtgactacagcatggcctacggccttcattatgtagccctgcgctacttcaatgctgctggcgcgtcccttttgggaaatatcggggaagaccataatccggaaacccatctcattcccctgaccatccaagccgctctgggtaagcgcgatgctatttccatctttggtacggactacgacacccctgacggcacgtgcctcagggactacatccatgtgaaggacctggcctccgctcatatccttgccctgaaccatcttgtcaagggcggtgcaagtcgggtctataatctgggaaccaagacgggactttctgtccgggaaatcatcaatgccgtcaaggaagtaacgggccgtgacttcatggtaaaggaagaaaaacgccgtgctggcgatcctgcgcggctcattgcctccagcgaaaaaattgcaaaggaactccattggaagcccgaacacagcagcgtcaaggaaattgtggagacggcatggcgctggcatagcggccaccccaatggatatcgctgagccttatggatatcctggtaaccgtcgatcatctcgccaaaagctttggcgctcatgatatctttgacaaggtgagctttaccattcgccaaggggaaaagctaggccttgtcggtgtcaacggcagcggcaagacgacgctcctgcgctgcctcatggatccctcctttgccgataagggaaccgtccaatatgcaggggaaattcgcgttggctatgtggaacaggggtttgacaatatcgaagacgaaaccatctgggagttcatgctccgttcctgcccggatattctttccctccgggaaacgatgaaggaacttgagcgggaaagcggcgaaatgacaggtgatgccctaaaggatgtcctggaccgttatggtcgggtggaaacccgctatgcccacttggacggttatcactacgaaaataacatcaagcgggtcctgatgggactgggctatccagaatccacctgggagcacaacgccctggccctttcgggcggacagaaaacgcgccttcagctggcggcggctcttgtcaattcgccggatctgctcatcctcgacgaaccgacgaaccacctggatattgtcatgagtgaatggctggaaaaatatcttcgtgagttccgcggtggtgtcctcatcatctctcatgatcgggccttccttgatgccgttgtggaaggcatccttgaaatggaaggggggaccctgcaccgctataaaggaaactattcccgctatgtggagcaaaaagagctccaggttctctcccagacccgggcttatgaagcgcagcaggaaaccatccgacgcacggaagagtatatccggcgctacaaggccggcatcaaaagcaagatggctcggggacgtcagtcccagctggaccggatggaacgcattgacgcacccgtaaaggaagaatcttttacgctgcgtctgccccatgccgctgaatccgcggaaaaggtcatcatgttggaacacctttccgttggctatgaaggaaacgcccttttaagcgacattgacctggtcctgcgccgcggggaaaaggtggccatcatcgggcccaatgggagcggcaagtcaaccctcctaaaaaccatccttcaggaaatcccgccccttcacggcgaagcaaagattggaaaccgcgtgaagattggctacttttcccaaagctatgagcgccttgattcccagcagaccattcttgacaacttccttacggagtatggcatgacggacgaacagacgcgccgtctattgggcagtatgctctttcgcggggaagacgtctataaaaccatcgggagcctttccggcggtcagaaagctcgtctggtcctcttgaaactggttcttgacggggccaattgcctcgttcttgacgaaccgacgaaccatcttgatatcatggccaaagaagccgtcgaagccgcccttgagacctttgacgggacggttcttctcgtcactcacgaccgctatctcgttaatgaagtggcaggccgcatctgggctgttgaaaaggggcacctcacgaattataacggcaattacgacttctatctggaagaacgggacaaacgccaacagcgggaagcgccgcttccggaatcctctcatcgagcgccgaaggaagaaccggtaaaacctgatggatcaaagcaccgcccccatgaggaaaaatccaaaaaccagcggatctatacgccggctgaggcggaaaaactcctgcctgaagtagaactgaaaatccgtgaacacgaggctctgcaaaaggtcctaagtcagcagattgccgatcctgaaaaccagatggaccttgaaaaaagtgcggcccttgccgcggaatacgaaaaggagcaacagctcattgatggcttcatggaaaaatgggaagctcttatggaggcccttgaatgacagcattatccattgacagtttcataaaagccctgcagggctatcacagcgatacggccttcaacccatgggccgattacgacccccagtgtgacattgggccccaggcacccctcatccgggcagccaatctgaagcgctatttgacgctccgccaaaaggcacgctttctttttattgccgaaggactgggttatcaaggcgggcacttttcaggcatggccatgacgagtgagcgcatccttttgggtcatcaccctaacgtgcggccccatgtggttcttggcgaggattacccttgccaaaggacaagcaatcccgagtcgcccctgttaaaccgcatgcagcgggaaaaaggcttcaatgaaccgacggcgaccgtcatgtggggggaacttgcggcccaagaactggcccctttccagacgattttgtggaatatttatcccttccatccctataaaccatcgggcatcctgacaaaccgcacgccgacgccaaaagagcttgacgaaggcattgactttgctcgtatgatccttgcccttgtgccggggatgcgcgtcattgccattggccgaaaaagtgcggacacgctccagaagtatggcgtagcctgcgacgcggttcctcatccttccatgggtggggccacgcgctttcgcagcgctgtggacgccttgtttgaatctgaataggtatttttggaggtaacatggaaagcaccattgccagtatgactaaggaagaggtcctcaagatttccctcacgtgcgggaaactgctcctgacaagcggcgccgaaacctatcgtgtggaagatacgatgacgcgcatctgcgccctcagggatatgcagattgctgccgtcagcacgccgtcatggatcatggtgggcgacgaaaccgtggacgggaccagtatggtctcccgcgttacgcggcgggggacggatctcaccctcatcagcgaagtgaacaacatttcctatcatatgcccacgtgggaccattcctttgccgaaaccatggccatgcttgatgaattgagtgcccgcccgtcaccgaccgcactctacagcatggtttggtccggttttgccggcggcttttttgccggcgtcattggtggcaatttctgggattttgtggcagccttcttgggctccttcctttctatggccttcatctgcctcgtgcggcccttccgccccagcagtttttgggaaacgactatggcaggcgtcatcatctgttttgtcacctatatgtgtcatctgttcattcctggtgtcactatggaatttgccattggcggcggaatcatgccctatttgcccggtatggcttttaccaacggaatccgggacttcatggccggtgacctcatgagcggaacgagccgggccggcgaggccattttccttgttggcggcattgccatcggcattgcggccttccttggcatcgtctatctttaaggaggactgccatgaacgtcatcctgaccatcgtcatcaagaccatctgctcctttttcggaaccgtggcttttggcaagatcttcaactgtcctaaacactgcctctataaagcgggctttgtcggcgctgtgggttttggcgtctacatcattctcctcagcggttttggcgtcagttccatgctcagcaattttgctggaaccgtagccctttctatctgcagtgagctctttgcccgctggtacaaggaacctgtgcctgttttttccattcctggcgtcattcctcttgtgccggggctgcccctttatcgggccatgaactatacgatgcaaaacggctacagcatgggtatgcatacctttgtctcggcggcccttgacgcaacggccatcgccatgggtattctccttatctcaggtcttgccaaggtttataagaccagtaaacgccttgtgtcgaaaaaggtccatcatcattccgaacgcttgtaaaaaaacgattgcttataaaccgcgggagtccttccttggagggactctttttgattgggcgccttacgatcttttgccttacagtcttttagcatcacagcatcttagtttccttccattttttcgcccgacagccagaactgaaggctcgtgacagccctttagaacaggcctcgaagaaaacagcttgacagctttcccctttgcgccccgccagaaaaaagattataatatccccaaaaggaggaatgccccatggccatctatcatacgcttacaagaacagtaaaggaaaacccccagacgggaagcatcatcagtgatgccatcatggatccagagaccctcggcaagggggtcaagatgtttgcccaagttacgctgaagccgggctgtgccgttcctattcatcagcatgtcggcaacaatgaaacgtattatctgattcaaggcagcggcgagtatacggacgaagacaaaaaattcaccgtcaaagcaggcgacgtgaccttctgcgctgatggcggcacccatggtctcttgaacacgggaaaggaagacctcgtcttcgtcgcccttattgccaataccatcgcctaaggcatttttgggaaggcggcctggcaggctgctatctctaaaaaatcggagccagctacgccttatcaaagggctgcgggcagcaaagcataaaaagagaagcggaggaagaaatgagcgaatcctttctttccccgtctttttttaaaatagttaatgaaagttttaaataaataagatgaaatatattcaaaacattaataaggaagcgtaacatttttctttcattcttacctaaaaatccccaaaaatgcacagaaaaaccctttctttgcccttctttccagtccgcggtggggatatatgacacactaggaaccgtgtaaacaaagaatggcataaaataaggcgtacagcgcccaaaattttcttgacagggtacgcgaggaatgctagaatagcatggtgtcacaggagaaactatgtcttgacggaggtgcgcaatgtttttggaagaagtaaaaaacggcgctccgactgtggtgggagtaaaacagacccagaaggccctcgtcaaggaaactgcccgcggcgtcatcgtggcgatggatgccagcgatcacatcacaggccccgtcagggccttgtgcgggattcatcaggttcctgtggaaacggtcccgaccatgcaggaattgggcaaggcctgtgggatccacgtgggagcagccgtggcggctgttcttgaaactcggtaaaatcttccgcttgggagattttaatacattaaatcttattcttgagaaaggaggtgccggaatgcctacaatcaatcagttgattcgtaaaggtagacaagttgttactcaaaaatccacggcgccagcattgaaaaattcaccgcaaaaacgcggtgtctgcacgagagtgtacaccaccactccgaagaaacctaactctgctcttcgtaaggttgctcgtgtccgcttgaccaatggtatcgaagttactgcttacattcctggtattggccataacctgcaggagcacagcgtagtcctcatcagaggcggaagagtcaaggaccttcctggtgttcgttatcatatcattcgtggcgcattggatactgccggtgttgctgatcgcgcacaggctcgttccaaatacggcgctaaacgcccgaaagcagctaagaaataagcacaatgcgtgaatgattcataacgaaggaggaattacagatgccgagaaaaggtcctgtaacgaaaagagacgtattaccggatccagtatatggttccaaattattaaccagattcatcaacaagattatgctcgacggcaaaaaaggtgtcgctgaacgcattgtctatgatgcatttgatctgatccattccaaaacgggcaaagaccccatggaagttttcgacgctgccatgaagaacgtcatgcctacgctggaagttaaagctcgccgcgtcggcggtgccaactaccaggttcctgttgaagtccgcgctgaccgcaagaccactctggggattcgctggctcgtcaactattcccgcctgcgtggtgaaaagacgatgtacgaacgtgttgccggcgaactgatggacgctgccaacaacaccggtgcttccgtcaaaaagcgtgaagatacgcacaagatggccgaagccaacagagcgtttgcacattatcgttggtaatctttacaaccaatcattacaaggaggagtaatctgtgggcagagagtttcccttagataaaatcagaaatatcggcatcatggcacacattgatgccggtaaaacgaccaccacggaacgtatcctgttctataccggtaagacccataagatcggcgaagtccacgacggcgccgctaccatggactggatggttcaggaacaggaacgtgggatcacgattacttctgctgcaacgacctgtacctggaaaggacattccatcaacatcattgataccccgggccacgttgacttcacggttgaagttgaacgttccctgcgtgtactcgacggctccgttgccgtattcagtgccaagggcggtgttgaaccccagtccgaaaccgtatggcgtcaggcagaagaatacaatgtaccgcgtatcgcgtacatgaacaagatggatacgacgggcgctgacttcttcaacgctgtccagatgatgaaagatcgtctcggcgcaaatgctgtgcctatccagattccgatgggtgctgaagatcagttcgtcggcctcatcgacctcgtcaagatgcaggctatcgtctatggcgatgaccttggcaaagacgaagaattcgagccgattcctgaagaatacgttgaagaagcccagaaatggcgccagaacctcttggaagccgttgctgaaggcgacgacgacctgatggaaaaataccttgaaggcgaagaccttacggaagatgaaatcaatgccaccatccgtaagatgacctgtgcctgcaagatgttccctgtcacctgcggttcttcctataagaacaaaggcgtgcagccccttctggatgccatcattgcttacatgccggctccgaccgatgtggctgacatcaagggcgtggatcctgaaacgggcgaagaaacaactcgtccttccagcgatgatgctccctttgctgcccttgccttcaagatcgcaaccgacccctatgttggccgcctggctttcttccgtgtctactccggtaaactgacggctggctcctacgtctacaactcttccaaaggcaagagagaacgtatcggccgtatcctgcgcatgcactccaaccatagaacggaaatcgaagaagtctatgctggtgatatcgcagctgccgttggcctgaaagatacgggcacgggcgatacgctctgcgatgaaaaggctccggtcattctcgaatccatggtcttccctgaaccggttatttctgtagccatcgaaccgaagaccaaggccgaccaggaaaagatgggcattgcccttggcaaacttgctgaagaagacccgaccttccgtgtccgcacggatcccgaatcttcccagaccatcatctccggtatgggtgaactccaccttgatatcatcgtcgaccgtctgaagagagaattccacgttgactgcactgtaggcaatccccaggttgcctatcgtgaaaccatccgcaaggctgttaagagcgaaggtaaattcgttcgtcagtccggtggtaaaggtcagtatggtcattgctggcttgaactgactccgctcaaaccgggcgaaggcttcaaatttgaaaacaagattgttggcggtgccattcctaaggaatacattgcacctgttcaggctggtgttgaagaagccatggaaaacggtgttgtggctggctatccgatggttgatatcggtgttaccgtttacgacggttcctaccacgaagtcgactcttctgaaatggcatttaagattgctggttccatgggctttaagtccggtgccgccaaagctgaccctgttctgctcgaaccgtacatgaaagttgaagtgacggtccctgaagaatacatgggcgacgttatcggcgacctgaactcccgccgtggccgcatcgaaggcatggaagcaagaaacggcgcccaaatcatttccgctttcgttcccctgtctgaaatgttcgggtatgcaacggaccttcgttccaagacccagggccgtggcaactactccatggaagtcgaccattacgaagaagttcctaagaacatcgcggaagcgattgttgccaaaaataagggaacggctgaataa

SEQ ID NO: 72 - DNA, 15868 bp, unidentified
  source 1..15868: mol_type = unassigned DNA
  misc_difference 10708: note = a, c, g, or t
  misc_difference 10709: note = a, c, g, or t
  misc_difference 10710: note = a, c, g, or t
  misc_difference 10711: note = a, c, g, or t
  misc_difference 10712: note = a, c, g, or t
  misc_difference 10713: note = a, c, g, or t
  misc_difference 10714: note = a, c, g, or t
  misc_difference 10715: note = a, c, g, or t
  misc_difference 10716: note = a, c, g, or t
  misc_difference 10717: note = a, c, g, or t
  misc_difference 10718: note = a, c, g, or t
  misc_difference 10719: note = a, c, g, or t
  misc_difference 10720: note = a, c, g, or t
  misc_difference 10721: note = a, c, g, or t
  misc_difference 10722: note = a, c, g, or t
  misc_difference 10723: note = a, c, g, or t
  misc_difference 10724: note = a, c, g, or t
  misc_difference 10725: note = a, c, g, or t
  misc_difference 10726: note = a, c, g, or t
  misc_difference 10727: note = a, c, g, or t
  misc_difference 10728: note = a, c, g, or t
  misc_difference 10729: note = a, c, g, or t
  misc_difference 10730: note = a, c, g, or t
  misc_difference 10731: note = a, c, g, or t
  misc_difference 10732: note = a, c, g, or t
  misc_difference 10733: note = a, c, g, or t
  misc_difference 10734: note = a, c, g, or t
  misc_difference 10735: note = a, c, g, or t
  misc_difference 10736: note = a, c, g, or t
  misc_difference 10737: note = a, c, g, or t
  misc_difference 10738: note = a, c, g, or t
  misc_difference 10739: note = a, c, g, or t
  misc_difference 10740: note = a, c, g, or t
  misc_difference 10741: note = a, c, g, or t
  misc_difference 10742: note = a, c, g, or t
  misc_difference 10743: note = a, c, g, or t
  misc_difference 10744: note = a, c, g, or t
  misc_difference 10745: note = a, c, g, or t
  misc_difference 10746: note = a, c, g, or t
  misc_difference 10747: note = a, c, g, or t
  misc_difference 10748: note = a, c, g, or t
  misc_difference 10749: note = a, c, g, or t
  misc_difference 10750: note = a, c, g, or t
  misc_difference 10751: note = a, c, g, or t
  misc_difference 10752: note = a, c, g, or t
  misc_difference 10753: note = a, c, g, or t
  misc_difference 10754: note = a, c, g, or t
  misc_difference 10755: note = a, c, g, or t
  misc_difference 10756: note = a, c, g, or t
  misc_difference 10757: note = a, c, g, or t
  misc_difference 10758: note = a, c, g, or t
  misc_difference 10759: note = a, c, g, or t
  misc_difference 10760: note = a, c, g, or t
  misc_difference 10761: note = a, c, g, or t
  misc_difference 10762: note = a, c, g, or t
  misc_difference 10763: note = a, c, g, or t
  misc_difference 10764: note = a, c, g, or t
  misc_difference 10765: note = a, c, g, or t
  misc_difference 10766: note = a, c, g, or t
  misc_difference 10767: note = a, c, g, or t
  misc_difference 10768: note = a, c, g, or t
  misc_difference 10769: note = a, c, g, or t
  misc_difference 10770: note = a, c, g, or t
  misc_difference 10771: note = a, c, g, or t
  misc_difference 10772: note = a, c, g, or t
  misc_difference 10773: note = a, c, g, or t
  misc_difference 10774: note = a, c, g, or t
  misc_difference 10775: note = a, c, g, or t
  misc_difference 10776: note = a, c, g, or t
  misc_difference 10777: note = a, c, g, or t
  misc_difference 10778: note = a, c, g, or t
  misc_difference 10779: note = a, c, g, or t
  misc_difference 10780: note = a, c, g, or t
  misc_difference 10781: note = a, c, g, or t
  misc_difference 10782: note = a, c, g, or t
  misc_difference 10783: note = a, c, g, or t
  misc_difference 10784: note = a, c, g, or t
  misc_difference 10785: note = a, c, g, or t
  misc_difference 10786: note = a, c, g, or t
  misc_difference 10787: note = a, c, g, or t
  misc_difference 10788: note = a, c, g, or t
  misc_difference 10789: note = a, c, g, or t
  misc_difference 10790: note = a, c, g, or t
  misc_difference 10791: note = a, c, g, or t
  misc_difference 10792: note = a, c, g, or t
  misc_difference 10793: note = a, c, g, or t
  misc_difference 10794: note = a, c, g, or t
  misc_difference 10795: note = a, c, g, or t
  misc_difference 10796: note = a, c, g, or t
  misc_difference 10797: note = a, c, g, or t
  misc_difference 10798: note = a, c, g, or t
  misc_difference 10799: note = a, c, g, or t
  misc_difference 10800: note = a, c, g, or t
  misc_difference 10801: note = a, c, g, or t
  misc_difference 10802: note = a, c, g, or t
  misc_difference 10803: note = a, c, g, or t
  misc_difference 10804: note = a, c, g, or t
  misc_difference 10805: note = a, c, g, or t
  misc_difference 10806: note = a, c, g, or t
  misc_difference 10807: note = a, c, g, or t
tcagatcgccacatcctgccactgtccgccgatcagttcgcgggtggatttgaacccggcctttttcagcagttcgaatgcttccgcacgtccgtcgttcaccaggtcgggatagtggcagtctgagtttaccatcaccggaatatccagctcacgtaagcggtgcagatagtcggtatgcgggtagacctcctgtttcttcacgaggtttttcgtgttgacttcgaccatcagtcccttttcggcgatcaggtgcagacagtcgttgaatggtttttgataccagtccgcttgcaggtcgaagccttcgcatttgtgcccgttcatgtatatcttgtccatgtgcccgacaatgtcgattccgcctgcctcgatcattcgccgtgtggaactgaaatagtgggcgaccagcttgcggatatctccgtcgtagtaggcgtcgacagacttctggtactcccggaaaggaccgtcgatacacaccatattctcttccgcaagcggctgtgcgatcggaagaaagtggatggaaccgatacggtaatcgagcggcagattgcggaagtaggggatggacgcgttgtagctctcgtctaagaaatcgatttccagtcctacgtatatttccaaccggtcactgtatttctttttcagtcgttctatttctgtcagatattcgggcatatcgtctttagacatgttccagaatgtttcgaacggcagtggtgaatgggatgaaaaaccgtaggcgcggaacccgtgcgcaacagcgaatttaatgaagtcttccggcgtgctccgaccgtcacagaatgtacaatggctatggtagttactgagttgcataaatttttacttgtaaaagggcaaagataatttttttatcccgaaagacaacctgtttgataaaaaaaggcttgattgctgcctaagggttagcggcagaatcaagccttgaaaaacacgtgaataatgaaaaatcgtatgttttattttattacgttcagttcttttccaactttgataaatgcagcgattgctttatccagatgttccgtttcgtggcctgcggacaactgtacgcggatgcgggcctggcctttcggcactaccgggtagtagaagccggtaacataaatgccttcttcctgcatcttggctgcgaaatcctgggataatttagcatcatacagcataacggcgcagattgcggactgagtcggcttgatgtcgaaaccggctgctaacatcttttcacggaagtagctgacgttgttcatcagtttcgtatgcaaagcatcgctttctttcagcatcttgaacatttccaggctggcgcctacgatagcgggagcgacagagttagagaacagataaggacgggagcgctgacgcagcatgtcgatgatttctttctttccggttgtgaatccgcccatggcgccaccgaatgctttacctaacgtacctgtgaagatatcgactcttccgtatacattatattgttcagccacaccgtgtcctgtcgggcctactacaccggcagagtgggattcgtcaaccattaccaatgcgtcgtatttttctgccagttcacagattttgtccatcggggccacgtttccgtccatagagaacacaccgtctgttgcgatgatgcgatgacgttgtgcctgggcttcttgcaggcaacgttccaggtcggccatgtctgcattggcataacggtagcgttttgccttgcaaagacgtacgccgtcaataatggaggcatggtttaaagcatcggagatgatcgcatcttcttcagtgaacaacggttcgaacagaccgccgttggcatcgaaacatgcagcgtacaggatcgtatcttcggttttgaaatagtcggagatagcggcttccagttgtttgtgcagatcctgtgtcccacagatgaaacgtacggatgacatgccgtatccgtgtgtgtccatagcttctttggcagccttgatcagacgttggttgtcagacaggcccagatagttgtttgcgcagaagttcaaaacgtcgcttcctgcgtttactttgatgtcggctctttgaggagtggtgatgatacgctcgttcttatacaatccggcagctttgatgtttgccaattcctgagtaaggaaatctttcagtttaccgtacataactttgttttttgttagtatttttaattaagttgacaattatatctctattatcgcagacaagtggcaaaatattattcttgaaaccatttttttctttgtctctgatttgtctgccgatgcggcaaaggtcatattttttttgaatatataggctaaaaaatacaagaaattcataccggaatgtttttattctctatacctttgccatcgaaaaaacttaaaagaacatcaaacgcaatgaagaatgtattagtaattggttctaccggtcagattggatcagagttaaccatgaagttgagaggtatctacggtggaaacattgtagcaggttacatccccggacaggagcctaaaggcgaactgctggaatcaggaccttctgcaattgtcgacattacaaacgaacagcagattgctgagactgtgtccaaatataaggtagatacgatttataacttggctgcactgctgtcagccgttgcagaagcaaaaccgcagcttgcctggaaaatcggtatgggcggtttgtttaacgtattggaagttgcacgtgaaatgcattgtgctgtattcactccgagttcaatcggtgtgtttggcaataacacgccgaaagacaagactccgcaggatacgatccgtaacccgcgtactatgtacggtgttacgaaagtttcaggcgagttgttgagtgactactacaacatccgtttcggcgtcgacacccgttccgtacgttttccgggacttatctcctatgtgacacctccgggtggtggtacgaccgactacgcagttgatatctattattcggctgccaaaggtgagaagtttgtatgtccgatcaagcagggtacattcatggatatgatgtatatgccggacggtctgcgtgcagctattgaaattatggaagccgattcgacgaagttcgttcatcgtaattctttcaacattgcatccatgagctttgatcctgaaattatctacaacaacatcaaaaagtatgttcctgacttccagatggaatatgatgtggatccgttacgtcaggctatcgcagaatcatggcctaactctttggatgacacgtgtgcccgtgaggaatggggctggaaaccggaatatgatctggattccatgactcaggatatgttggctaaattgaaagaacgtttcaataagtaagaattaattttccgatcattagcagatcggtaggaaagaggcgactgcccggtgcgggcagtcgcctctttgtttggatcgtttttattcagtattgtaggctgtttcaatcataatgtgtctgttgcttgtgcagggaatgactaagtcaaaagtgtatgaaaaattatgttgtaaaacatgaaatggttaaatcaggttaagagaaagcttttttttgtggaaatattatgctgcataacataaactctctatatttgcactgtgtttttcatggtattagatttaaggttaacaatgaagattggctgtccgtgaggatagcctttttttatttatacccggttgatgttgtttcctccgagaagcgatcattttatccgaattgcccgttcttttggtattcttgattatatttgtatatctgaaaagattcattgtaataaaaatatctttatatggaaatgtacaaagcaaatgataaccggtatgccgatatggcttataggcgttgtgggcggagcggattgctattgccggtcatctctctgggattatggcataatttcggcagtgtagatgtgttcagtaactttattcagattgcgtatgccgctttcgacaatgggattacacattttgatcttgccaataattacggtcctgtgtatggatcggcagaggaaaatttcggccgtatcctgaagaaaggtctggggcaatatcgggatgaacttgttatttccacaaaagccggatatgacatgtggcctggtccgtatggcaactggggaagtcgcaagtatctgatggcaagccttgaccagagtttgaagcggatgggattagaatatgtggatattttctattcgcatcgtccggacccacagacgccgatcgaagaaacgatgggagcattggctgacatcgtccgccaaggaaaagccctgtatgtcgggatatcgaattacactgccggacagacggaaaaagcacttgccgtattgaaagaacatcgtgtgccttgcttgatccatcaagcgcgttattcgatgctggatcgcaggatcgaaccggacttgttgcctctgttgaagcaggaaggagtagggatgatcgccttctcgccattggcacagggcatgttgacggataagtatctgaacggtattcccgataattcgcgtgcggccaaatctacaggccatcttcaacgtgaacaggtgacggaagaaaaaataaataaagtaagacaactgaatgaccttgccaaacaacgcggacagacgttagcggaaatggcgattgcctggctgttgaaagacgaccgggtgacgagcgtcctggtgggagccagttcggttgcacagttgatagataacctgaaggcgttacaaaatacagccttttcagcggaagaaatacaaatgatagaaaatatattacagtaatatacactgataaatcatcatttattaatccaaacaattaatgaaaccattcttatatcaggttgcatcccttttttattctgaatacggggcggaagtgagccgtctggcctttgttttcccgaatcgccgtaccgggctgttcttccagaaatacttgtcggaagtatctgagaagcctcttttctcgccgacgatcctgacgatcaacgatctgtttgtacagttgagcggaaagcaggctgccgatcggatcagcatgctgtttaaactatatgatatttatttgagacatagcggttcttccgaaacgttcgacgagttcttgtattggggggaaatgctgctgaatgattttgacgatatcgataaatatatggcagatgcccgtatgctcttcaccaatgtgacggacctgcgtgagatagagaatgattttagttttctgagccctgaacaaattgcggctatccggactttttggtcttctttttacccgaaaggagatacgcccaaccaggaacaatttctggcggtctggcagattttatatgccctatataccgatttgcgggaagcgcttgccaccgaaggcaaaggatatgaaggtatgatttttcgggaagttgtcgaacagatggagaaagacgaatgttgcgacctgccctatacaaaggttgtatttgtcggactgaatgccctctcggtggctgaagaacgtttcctttccgggttgcaaaaacggggaatagctgatttttactgggattacgcctctccgaaagtgacggatccggataataaagcctcttacttcgtggagcgcaatttgcggcaattcccgtcgcaattaattgaaaatggacaattgactattgacaatgaagatgacgacaaaaagaagatcgaggtgatcggcatcccttccggaatcggacaggcaaagcaagtgtgcagcattctgaacgagctttgcaaggaagacgaaatgagtgcggaagaagcgttgcggacggctgtgattctgccggatgaacatttgttgattccggttctgaatgccattcccgaacagatcaaacggatcaatgtgacgatgggatatccgttggccggtacaccggtcgcatctttgatggaatatattctggctttgcaaaagaatattcgttatgtggaccggaggccggtgttctatttccgggatgtcttgccaatcctgaaccatcggtatatctcgactacttctccggagatggtttctaatctggtaaaagatatttcagaaaacaacaagatttacatatcgtatgacgatctgaataagacgccattgttgtccatcctctttactccggtgactgcggtggaaactttctccgattatttgattaacgtgttgcaggaactgaataaagcagttgaaggtggaaagttgaaagttgaaagtgtaaatagtgacacggagccactttcaactttcaactctcaactctcaactattaacgacatcgaacaggagtttatcttccattatttcgctacggttaaccggatgaaggaagtcatgcgggaggcgaatgtagaaatgaaaatcgacacctatttccgtttgctgaaacgtgtgacggacacaattacgattcctttccaaggtgaacctctttccggtttgcagatcatgggtgttttggagactcgtgcgcttgactttgaccggttgattatcctttcgatgaatgaaggaattttcccgttgaggaaagcggctaattcatttattccttataatcttcgtcgtggattcggtttgccgacatacgaacatcaggacagtgtttgggcgtatcatttctatcgtttgatttatcgtgccagccatgtcagcttgctttatgatactcggagtaacggattgcagacaggcgaggttagccgtttcgtgcatcagttgcattatcattatgaggagccgatacagaataagctggttgtttacaatgtctcttcttccaagactcctgccttgcaggtagctaagacggaggaagtcatgaaccgtctggctgatttccggagtggtgggacgcgggcgatatcggcgagtgcagtcaatacctatctggattgtccgcttaaattttatttctccgttgtcgagggaatacgtgaagaagaggaggtaagcgagacgatcgaaagtaatgtttttggaagtatcctgcataaggtgatggaagaattgtatcagccattctgcggaaagatggtgacggctgatctgctgaaagcgatccgaaaagatacgcctatgttgacgggagcagttgcccgtgcctttgccgaaattttctttaaaacggacattgttcgtccactcaccggacaaaacttcctgatcggcgagatgattcgcaaatatgtggagaaagtgctggaacgtgacgcaaaacagactcctttccgttatatcgaatcggaaaagaagataaaatgccttttcccattgacggataaaagcaatatccagttgaaaggatttatcgaccgtatagacgaagtacgcgatgtcgtccgcattattgactataagagtgggagcgggacgacgcagtttacctctgtagaagctcttttcgacaaagcagatacggatcgttccaaagcggttatgcaggtctttatgtatgcatggatgtttaacaggtcagttcagctttcaacagctattcagccgggtatctattatatgaggaccctcttttcttcctctttcgatcctggaatttaccatcgtacagaccggttcaaaacagaacaggttttggacttcgccaactattgcacggattttgaagacagcctgcgaaattgcttggatgaaatcttcgacacagaaaccccattcgtgcaaaccccgaacggcaaagcctgcatgtattgtccgtttaaggatatttgcggaaaatagtgtttttacagatttcccatatattcatccacaatttcattcaggaagcggttgaatggaagaagctttcgaaaacaatcgatggtttcttccatccagtccggctggctgaaaaaactgtcgggcttaatacctataacgctgaagtctttgtgccttaatatatgaccgtaaggagaatcggaggggaaacctgccgggatacgttttagcatgtccccttcgagtgacgggtacagagctttgaaggaaggctcttcgatgatggaaacaaattcatctatgttattgtatatttcacgtcgaaggactttcaatatttccggtttgggataccagataccaccggacagtacgcagtattccggttcaagatgaaagtagtaagctccccggatactatgacgtcctccttgagcaatacaggctgacatataagtcttgtaaggcgacttgtcgaggctgaagcggatgtcgcgattaatacggaacagacatttccgtgcatccaatccccgtatatcaggatcaaatacgctgattcgttcgattaactcttgtacttcgttgataaaagcacagcgaagtttgtcatatcgttctctattttcatggaaccaaacggtattattgttgcgtcgtaaatcgtctaagaatcggataatttctgcattcatattaggatattctttttttattgtattttgtatctccattgtttcggagtcatctgtttcatctttttgaaatagcgattgaagtagggaatgtcggtgaagccgcattgccaggctatttcgttaatgtccttatccggaaagttgcggagtaaagtgccaacggcctctatccggtattcgttgatgaagtttgtaaacgttttgcctgtttcacgtttgaaaaacgagcagaacgccgttgtgctcatgctgattacgtttgcggcgtccgaaagagttattttctccttgtaatgctcgatgacgtatttgaagatcagttgcatacgttgcatgtttttggtaatgccgttgaataccgtttcctgcaaaccgatagggattaaatcggttgtggttccgatttgttgcaggatgcggatcaacatcagcatcctttcgcttgcattcaggaggttcatttcttctaagcaggatttgatctttccggctgtttcgcctgtcagcaggatgccttgctggattgccgataaccggtgagcggcatattcccattcggtaaaaaaagacaggccggtttgtagcaagtcgggattgaattgcacaactatgcatctccgttttccatcaggctcgcagctttcggggttatacatccaacaatgtggttggttggtcgggaccagtacgacttctccctcctcgaacggctccagaaagtcgcctatcatccggtagcctgaacctttcacaacataacatatttctatttcgggatgaaaatgaagaggcatttcgtctttcgggtacaagctggaataatcgtagcgtaatgaggcacaactatcttttttgatttgttcgaattttagtttctcgtgcatgtcggatgaactttctgataaaacacagtaaaattagacaataattgcataatctgcgacaattacacttaataattttgttgtttctttgcggccggaaaaacagaaagattgaataggttatgaagaaaggtttgtatgcattgtcttttggcacatttgggttggggattgcagagtttattatgatgagtatcttgccggatgtggcggcaggatttgatatttccttatccgaagccgggcatcttatttcggcttatgcgttgggggtatgtgtgggagcaccgttggtagtggtggtggccaggagttggccgctacgtacgatcttgcttgctttggttgggctttttgttgtcgggaatctgcttatggctctgtcggccgattattggatggggttgtgtgcccggtttgtatcggggttgccgcatggggcttatttcggagtcggttcgattgttgccagccgtttggcggagaaagggaaaagcacttctgctgtagctattatgataatggggatgacgattgccaatttgttcggtgtcccggccgggaatttcctggggcactttctgtcctggcgtttggtttttgtgattgcagcgttgtggggtggcgtaacgatttggtttatccggaggtgggttcctgttttgcccgccctgccggcgacgaatctgaaagggcagtttcgttttttgagaaggccggaaccgtggatgctgattgctgctaccatgttaggaaacgggggagctttttgctggtatagctatgtcaatccgttaatgacggaggtgtccggtttcagtgtcgggacaatgcctgtattgatgttgctggcgggtgcgagcatgtgtgtcggtaactatttgggagggcatttgtctgatcgttttacacctggtatcgtagcgatgtccatgcagtttctgatgtttgcatcacttctgctgatttatttttttgcttcgtacggctttttgtccgctttgctgatgtgcgtttgtactggttgcctgtttgcagtttcttctccacagcaattgttgttgcttcaatattctcctggcggagagatgatgggcggggcgatggtccagcttgcttttaatttggggaatgccgtgggggcttattttggaggattgtcgatcgaacatggggcagggctggaaagtacggcattgatcggttcgttttttgccctgttaggaactacggtgtttctggtattcaactatatggtgtttaaacctcagaggaaattacttttaaaggggggaatataatttccgaggatcaagacggtgtttttggagataaaaaacagccgtcnnnnnnnnnnnnnnnnnnnnnnnnnnnnnnnnnnnnnnnnnnnnnnnnnnnnnnnnnnnnnnnnnnnnnnnnnnnnnnnnnnnnnnnnnnnnnnnnnnnncgaaatcgggacggtgtttttggagataaaaaacagccgtccgaaatcgggacggtgtttttggagataaaaaacagccgtccgaaatcgggacggctgtttggatttataatgtctcttgtttcagttgttcgacgaaacgatcgattcgctgtagttctttcggaatatcgattccctgcggacagtgtggattacattggttgcaactagtacaatgatccgcttggcggagtttcggtacactgcggtcgtacccgatcagataagcccggcgagcttcgcgatagttttcatcctgtccgctctgagggacattcccctcgttcacacatttattataatgaagcaaaattcccggaatatcgataccgtaaggacaaggcatacagtatttgcagtcgttacacgggatggtcggatactgcatcatcaagtcggcggtgtcgaacaagaaacggttttcctcttccgtcaacggttgcaacgggcagtaggtgcggagattgtcttgcaggtgctccatgtaagtcatgccgctcagcacggtgagtacgccgggaaacgagccggcaaaccggaaagcccaggaggcgacgctccgtcccggttcgcgttgcttcaggcgggcgacgatatggtcgtgcacgttcgaaagccgtcctccgaggagtggctccatgatgatggcgggaatcccccgtttctgcaattccccgtacagatattccgcgtcggtgtttcgcgggttgatctctttggcatgtttccagtccaggtaattcaactggatctggacgaaatcccattgatattcgtcgtgtttcgaaagcaaataatcgaacacctctatatctccgtgataggagaaacctaagtttcggatacgtcctgccttgcgttcttcgagcaggaagtcgagtatgccgttcttgacataccggttttcataggcttccataccacccatgccgatcccgtggagcagcatataatcgagataatcgacttgcagctccttgagcgaattgttatacatcgcgatagaggcttcgcggctccatgtgtcgggagagaagttcgaaagcttggtggcgatataatatttgtcgcgcggatagcggctgagggcgatccccatagcatgttccgaacgtcctttgcaataggcgggcgaggtgtcgaagtagttcacaccgtgctcgatggcatagtcagtcagccggttgaccatctcctggtcgatttcgtcatcgctgtctcttgcgctgtttttggcaatggtcggcaggcgcatgtatccataaccgaggatggaaactttgtcttttgtggacggcgtcgtgcggtatgtcatccggtccgtgggaataggggtggagcttcccggacctgaggccatcccgctgtccgaactgcacccggagagcaacggggcggtagttgccgtgctgattcctacaatcttcaggaaatcgcgacggtttatcgcttgatgattgtcttttttcatatatgatgattcttttatttcttgatcaaatattccggtgttgttcgtgtccttccacatatatggcgctgaacggacgcgacgggcacaggttttcacaggctccgcagccgatgcatttttcctcgtttacgaccggcagttgaggcgaatccgggtcgttcgggtcttttgccaccatcaagatcgcctgggtagggcaatggcgggcacagttgccacaagtgacgccgtcccggttgacgatgcaattttcctgaatcagtacggcatgtccgatctggatagccgtcttgtccgctttcgtgatcggacggatcgctccggtcgggcaaacttccgaacatttgacgcattcgggacgacagtatcctcgctcgtacgatacttctggctgcataaatgtttgaaggttccccgaaggacgcagcacatggttcgtacaaaccgatacacaaagctggcacgcggtgcaatgctgggagaaattggcagcgctcagcgagcccggaggagtgatcggggttgtccggtccggtttctttttatcttcgatgatggccagtccgccgtcgactttcttgtccgggagttgtactttttcctgggctttcagtgcggctgaagtggcaagtaatgccgatacggtaaagaatttgcgacgatcgggcttgtctacggccggttgggcggtctgtatttccgccttgtttgtttttctgcgtgtatatcggatggctccctgccggcatttgtcgatacaatccatgcaggcgacgcaacggctgtaatcgatctcgtgtgctttcgcattgatacaggctgctttacaattgcgggtacacaaaccgcaaccattgcatttggacgtatcgataaccggcttgaaaacggaaaaacgggagatcaatcccaaaaacgttcctaccgggcagatcgtgttgcaataggttcgcccattccgccaggcaagtatgatcagtataatgaaagtaactgtggcaatgataaaggttgggaggctccgtagccagacttccgtctcgtagaaagcataactgcccgcccgttccgccaagtaggccagaaagttgttcccccattgccagaggggtgcgaataagttagaggcgatacgcccgtaagcgctgtagggtgcgatcaaggccgcccatgcccctaacccactgatcatggcaaggataaagatcaccatcaccccgtatcttaaccaggacaaggcgggggaataccggaaacgatttttcttccgtttccccgccagccatgaaacgacatcctggaatataccgagagggcagattacagagcagtaaacccgaccgaaaatccaggtcaatgcaatgagcaacagcaccacgccgaggttgagtgccaataccgccggcaggaactgtattttcgccagccacccgaaccatgtatgcaacgtccccgtgaaatcgagaaacagcagggtgacaagcgtaaaacagataagtgcagttgtaagtctgatcgttcgcaacataataaactctttttagatagtctgttattttatgttgcaaacataataaaaggaaatggtttgcaacttacaggaattacggattgatgtaccaatattacggttttgtcaacttctgcaaaaagtctggctgacaaaccttagaacttcaggcaaggccgtccgccaataggtccagctatggccgccgtctcgtactcggaattcatgcctgatccctttctgcttcatgacctggtgcacctgcatgtttccgtccagcaggccgtcgtcatcaccgcaatcaatgtaataacgaattttgggcaagttgttttgattccagtcggaaaggatcttcaagacattgttttgcttccagtgttcgtctcccggcccgaacaggcggttgaataaatccttgtgcgatttgttttttcttgcctccatgactgtgtcgtcgaaaacggcggcactcaacggagcacatgcgcagaacatgtccggatgatgcaagctgtacaggaatgatccgtagccacccatcgacaatccggcaattgcccggctttctttgtcactgcgaatccggtatgttttttccatataggggataagttcttcaaaaaacatgtcttcataaggtacttttccatcatactggttgatataccaagtgtcccatgcgtccggcatgacgattatcatcggcacggcttcctcgtttgcgatggcacggtcggcaatcgttttcatttgtcccatctgtatccagttggtttcattgtccgtataaccatgcaagaggtagaggaccgggtaattccttttcgaggtgttgtagtcggaaggcaggtagatggagtaggaaactttcctacctaatttgttactttcgaaagagagcgattcgaaaactgtactttgcgaatatcctgcaacgttgaatagaaagcacaggatacaatagagataaaatttgtttttcatatactattaataattagatttgtttgtctggacagagtaagaataagagaagagagcttgccggaaaacccattaggtttcgacatactctctttcccttattgggaaattaatccgccaccggatagggaaattcggtcaaccctttgtacatgaattgataggtcggaacttcgattcccaattcttgggcagttcgtacgacatagcctgtcaatgtttccacttcggtgcgattgcctttttgaaaatcactgtgcatggaggttgtggagttgttaggcatgatcttctgggcgtcgatggcggagaatacttgaccgtccggcagacgaatccctttggcttctgccacgcttttgagttcataacctaatgtgatgaacagatcgatatggttatttaccacttcgccaatcgtttcattgaaataggaggtgatagtggcggcggtcgagatcatgaagaatttcttccagatttccaagtcaatgtcatccggtattgtggtaaggatacgggcgttggccaatatatcctgtaagtctttctgtcgtttcttgtttccttgtttacttccgaagaacatccggtcctttatggtgaacttttccactcttcccggtctgaccaagcgggaaccgatgtaaacgcatcctttccaaacctcattgttcggtaatagcttttgtatgcgttccgctatatccgctccgttcagcaggggaatgataaccgtattagggccgatgatcggagtcagctgaactatattctcctccaagtcgtagcttttggtacagcaaaacaggtaatcgactggtcctatttcagcaggattgtcggttgcgagggttggttttgctttgatcgtcaggaatgtatttttgacttcgatgccgttcttacgtatctcttccaggttttcaccccgggaaatgaaatagatgtcaatatcttcagagtctttgtaacgggcagctaatagtcctccgtagtagccgcctacagctcctataccggaaatcgctattttagttttattcat

SEQ ID NO: 73 - DNA, 19168 bp, unidentified
  source 1..19168: mol_type = unassigned DNA
atgttcaacaaacaccctaaaggtctgattgccgcatcctttgctaatttgggcgagcgtttcggcttttataccatgatggccattcttgtactttttttgcaagccaagttcggactggatggaaaagaggcaggtttgatctactcaacattttatttttctatttacattcttgcattgataggtggtattattgccgacaagacccgtaattacaaaggtaccatttttgccggtattgtcctgatggcggtaggctacttgatgcttgccatcccgtctcctacaccggttgccaataaaaccttgtttttggtgattacttgtgcggccttgtttgtcattgctttcggaaatggtcttttcaagggaaatcttcaagcgctggtagggcagatgtacgacaatccccaatattccagcatgcgtgattccggtttctccttattctatatgttcatcaatgtaggtgccatctttgctccgtttgccgcagtaggcgtacgtaactggtggctgtccacattcggctacaattatgatgccgacctgcctgccctttgccacggacatctggcaggaacgctgactcccgaagctgtggacacttatagtgcactggcaacgaaagccactatttccggaacacccgtaacggatatgacggtatttgccaatgaatatctgaacgtgtttaccaccggtttccattatgcattcggtgtagctatcttggctatggttctctctttggtaattttcgtcatcaacagaaagaaattccccgatcccagcaagaaggtggctgcaaaagcgggcgatgccactgcagtggagatgagcgcacaagaggtaagacagcgcatgtatgcattgtttgccgtattcggtgtggtaattttcttctggttctcgttccatcagaatgggttgacactgacgtattttgccaaggaatatacagatttgaatttgttcggcatggctatttccgctgagctgttccagtctttgaacccgattttcgttgtatctctgacaccggtcatcatggctgtctttgcagcacagcgtgccaagggtaaagagccttccactccgcggaagattgccatcggtatgggtattgctgccaccggcttccttataatggctatcggttcttatgtaagcaacttgccgatgcacaaggatataatcgctttgggtacctctccggtgaaggtgactccgctgttgctgatggttacctatctgatattgactgttgccgaattgtacatttctccgttgggcatttcattcgtgtccaaggtggctcctcccaaatatcagggtatcatgcagggcggttggctcggcgctactgccattggtaatcagttgctcgttatcggtgctatcctttacgaaagcattcctatctggatgacgtggacggtatttgtagtagcgtgctgcatttccatgttcaccatgctgttcatgctgaaatggcttgaaaaggtggcgaagtaatcggaaacgaaagataaaactaaaggctgcgcaatgttcgtaatgaactgcgcagcctttagtttttggagggcttttaatgccgggactcagatttccagtcccatgatgtagtcattcatgtaatatccgtttcctatcgggaaatccccttcacggagtttccgcattcccatatgttcgtaaaactgcagtgccttgttgttacggttcacattcaattccatcagacaagggccgggatgcactttcttgatgtacttgatggcttcgcgaaagaggaaactgccgcaatgtgcaccctggtaataggggagcacataaatcttttgcaggtggaataaatcttctccttgctgctgtacggacacatagcccgccgcttcacattcttcgtaagccaggaaatagacgtggccttcctcttccatttgtttacggatattgtccaatgaatacatccattccatcatgtagtcggtctgctcgggagtaaggatatccttatacgtgacgggaaatatttgctgcgcaagtttctgaatcagtgcgcagtctgctgtcgttgcttttcttatggtaaacatatcggttgtatttatactgtttggggtgtaaagttaagccttttttgtgaaacaatcgttatctttgcagaccgttaccgaactaactaattctgattttaaaaattatggcatttacgagcaacattatgattgtccgccacagattgctgaaggaactggtaaagctgtggaataacaacgaacttgtggataaaatagaccggctgcctatcgagctgagtccgaagaggtccaagcacgcgggacgctgctgtgtgcacaaagagcgcgcggtgtggaagtacaagtcattgccgcttctgggactcgatatggaggacgagacggatgagctgacccccttgtcggagtacgctgcccgtgcactggacagagcggaaaatggcaggccgaaagacaacatcatgtgtgtgattgacgaagcttgttcggcatgtgtgcagattaactacgagattacgaacctctgccgcggatgtacggcacgcagttgccaggtgaattgtcccaagaaggcagtgcacgtcaaggagagcgggcaggcatggattgaccatgatgcgtgtatcagttgcggcatctgccataagagttgtccctaccatgccattgtttatattcccgtaccttgtgaggaggcttgtcccgtgaaagccatcagtaaggatgagaaggggatagagcatattgacgaaagcaaatgtatctattgcggaaagtgtctcaatgcatgtccattcggagcaattttcgaaatatcgcaggtgttcgacgtgttgcacagaatccgcaagggtgagcaggtagtggctatcgtggctccgtccatcctggggcagttcaagacgactattgaacaagtgtatggcgcattgaaacaagtcggttttacggatgtcatcgaggtggctcagggagcgatggataccgtcagcaacgaggcgcacgagctgattgagaagctggaggagggtcagaagtttatgacgacttcctgctgtccgtcttatatagaattggtgaacaagcatattcctgccatgaagccttacgtgtcgggcaccggttcgccgatgttttatgctgcccgcattgctaaagagaagtatccggatgcgaaggtggtcttcataggtccttgcgttgccaagcgcaaagaggcgcagcgcgacgaggcggtggactttatcatgactttcgaggaggtggcttccgtgcttgccgggttggatattcagatggagcaggcaaagccctattccatgagtttcacttccgtgcgcgaggcgcatggttttgcgcaggcaggaggcgtgatgggtgccgtgaaagcctatctgaaggaagaggcagataaaatcaatgccgtacaagtggctaatctggataagaaggctatcggtgcgttgcgtgcttacgccaagtcgggcaaggctccggggcaatttattgaagtgatggcttgcgagggcggttgtattaccgggccatgttcgcataatgaaataactgccggaaagcgccagctgacgcaggagttggcaaagagaaaagagacgtattagccctttgtccgtttatatgaagcatttgattgacaaactgcggagcaatcgcaggctgggtgccgaagagtataaagccttgcttctttgccgggacacagaacttgcagcctacctgcaggagcttgcccgggaagaagcgcttgcccgctttggcaataaaatcttcattcgcggactgattgagataaccaaccgttgccgcaataactgctactattgcggcatacggaaggagaaccggaacatagtccgttatgagctggcgcaggaggagattctttcgtgttgccatgaaggctatcggttgggcttccgtacctttgtgctgcaagggggcgaagcgccggcggtgaaggatgaggggatggtggagacagttgccgccatccggcaatccttcccggattgtgccattaccttatctttgggcgaaaaatcgcgggaagcctacgaacgtttcttcctggcaggtgccaaccgctatctgttgcggcacgaaacctgcaacgaagggcattatcaccggcttcatcctgctgagatgtccctttcccatcggttgcaatgcttggactggctgaaagagataggctatcaagtgggaaccggaatcatggtgggcagtccttaccagacggtggaccatttggtagaagacattctcttcatcgaacggtttcagccggagatgataggcatgggaccttttcttccacatcacgatactccgttttcctcttttccgtcgggagatatggagttgacgttgaagttgctttctatcttccggttgatgcatcccgcggcactgatacctgctaccactgccctgggcacacttgctccggacggacgggaacggggaatattggctggcgccaatgtcgtgatgcctaatctttcgccttctcatcagcgggcgaagtactccctctatgataacaaagcttctgcgggtgccgaagcggcagaaggtttgctaaaattggaggaacaactgaaagggataggctatgaggtatcaagagagagaggagattatgagaatggagaattgaccgttgataattgataattttcaaatcttcattctttattttaattaccaattatcaatttacgaagtgtataacataaagtcaagacaagcagaagaattcatcaatcaccaggagatattggatacattggagtatgcgcaggcaaaccgcaacaaccgtccgctcatcgaaagtttgattgacaaggctgctttgtgccaggggctttcccatcgggaggcggccctgctgctggaatgtgacgagccggaactggtgcagcgcatctatcatctggcatgtgaaatcaaacggaaattctatggcaatcgcatcgtgatgtttgccccgctttatctttccaactattgcgtgaacggttgcgtctattgcccgtatcatgccaagaaccgtaccattccccgcaagaaactctcgcaagaggagatacgccgcgaggttatcgccttacaggatatggggcataaacgccttgccctggaagccggagaagaccctcgaaacaaccctatcgactatatcttagagtccatccgcaccatctacagcatccaccacaagaatggggccatccgtcgggtgaatgtcaacatagccgccactacagtggaaaactatcggttgctgaaagaggcaggcatcggcacttatatcctttttcaggagacttacagcaaagagcattacgaagccttgcatcccacgggaccgaaaagtaattatgcctaccacaccgaagcgatggaccgtgctatggagggtggcatcgacgacgtaggtatcggcgtattgttcggtctgaacacctatcgttatgacttcgtaggactgctgatgcatgccgaacatctggaagctacctttggcgtgggtccgcataccatcagcgtgccgcgtatctgtccggcagatgatatttcgaccgaggattttcccgatgccatctcggatgagatgttctgccgtattgtggcggttacccgcattgcggtgccttatacgggaatgattatttccacccgtgagtcggaagccgtacgccgtcgggtgctcgaactgggcgtttcgcagataagcggcggttcgcgcaccagcgtgggaggctatgccgtgccggaagccaaagaggaagattcctcccaattcgatgtgagcgaccggcgcacgctggatgaagtggtgagttggctgctcgacctggggcatatccccagcttctgcaccgcctgctatcgcgagggacgtaccggagaccgcttcatgtcgctcgtcaagcgcggacagatagcaaactgctgccagcccaatgcactgatgacattaaaagaatatctggaggactatgcctcctccgaaactaaggagaagggcatacagctgattcgtgaggagatggagcatatcccgaaccccaagatacgggcgatagccgaacgtaatcttcaggagataggggaggggaaaagagactttagattttagatttcggatttatgaataatacacctcgttccaaccgcctgcacattgccgtctttggacgacggaacagcggaaagtccagccttgtcaatgccttgaccgggcaagacacggcattggtatccgcaacgcccggcactactaccgatcccgtaaccaaagccatggaagtatatcctttgggcccgtgcctctttatcgatacccccggttttgatgacgacgaaggcgaactgggcggtatgcgcgtggagcgtaccttaaagacggtggagaaagcggacatcgccctcttgctttatgaagctgacggaacgctggaacagcaatggctaaagctgctggcagcgcgcgaaatctccgtgatactgatactgaataaagccgattcccgtcaagacaccgcttccgtggtgcttcggattgaaaaggagtgcgggcaggctcccgttgtggtcagtgccaaagagggtaccggcattcaaggtatcttcgatgctatcctcgaaaagcttcccgagaattttggtgagcagactatcacgggcgatttggtgcgtgaaggagatgtcgtcctgctggtgatgccccaggatatacaagcccccaaaggtcgtctcattcttccgcaagtgcagaccatccgcgaactgttggataaaaagtgcttagtgatgagctgcaccaccgacaagctgcaagcctccctgcaagcccttgtccgtccgcctaagctgataatcacagactctcaagtgttccccatcgtctatcaacaaaagcctgccgagagtagtcttacttccttctcggttctttttgccggttacaaaggagacatcaatgcctttgtagagggagctgccgctattcatagcctgacaccccaatcgcgtgtactgatagccgaagcctgcacccacgccccgctgaccgaggacatcggcaccgtcaaaattccccgcctgctacgaaagcgcatcggcgaggaattgcagatagactttgtatctggaaatgactttcccagagacttgtcccgatatgatttaattatccattgcggcgcttgcatgttcaaccggaagtacgttctcaatcgtatagcccatgcccgcgcacagcacatccccataaccaactacggagtagcaattgcgagtctgaccggtatattggataaaattgttatccatcggtaaatatccctctccctctttgttcatgttactgatgtaatagagtagtgtgaactactttttttgttaattatacttaatataaggtactttgtaatgcaaggtactgatataatacatatatttgtgccatacaaggaacaacaatagaatgaatgaggacactcattactctattgcgcagccaaatagtaaatcgtaaattgtcaaatagtaaataccattatggatgtaaacaatgtaaagtcgcaaatgcgcaagggcatgcttgaatattgcatcatgctgctgcttcacaaggagccggcttacgcttcggatatcattcagaagttgaaagaagccagactgattgtagtggaaggtacactttatccgttgctcacccgtctgaagaacgacgacttgctgggttatgaatggattgagtctacgcaaggtcctccacgtaaatattaccggttgacggaaaaaggagaagtctttctcggtgaactggaaatgtcctggaaagagttgaacgagacggtgaatcacatcagcaattcttgaaatgaccacagagaatatgctgcattcgccgaatggtaaatagtaaatcgtaaatagtcaaattgtaaataaatagtgtgttatgaaaaagacattaactgtaaatttaggtggaaccgttttcaatattgatgatgacgcataccgtcttttggataattatctgagtaatctcaagatgcacttccgcaaggaagcaggtgccgacgagattgtagatgatattgaacgccgtatttccgaactctttgccgagaaattgtcggccggttcgcaagtaatcacgatagccgatgtggaagaggtgattgcccgcatgggaaagccggaagatatggaggcggaaggagagagtgctagtgccgattccggcagcacgagtgccgggggcggctatggtgccggtgcttggaacagcaataccgcttatggcactacacgccgtcgtctataccgcaatccggatgacaaaatgctgggtggtgtcatcagtggaatggctgcctacctgggatgggatgtaactttacttcgactgttactgcttgtcatcttgatttgtggggtagggacattgataccggtctatatcgtgtgttggctggttataccggaagcccgcacagcagccgagaagttgagtatgcgtggcgaggccgttacggtggagaatatcggaaagacggtgacggacggttttgagaaggttgccaatggggtgaatgattatatgaggtcggataaaccccgtactttcttgcagaagttgggagatgcattggtgatgattgtcggctggttcttgaaaatctgtctggtgatattcgccattatttgcagtccgatactgtttgtgtttggagtggtattcgtggcgctgttgtttgctgcgatagcggtggctgttggtggtggtgcagctctcatttcccttttcccgatggctgatgtggtactgcctacttctccgctgtctgccattgtgatgtacattgcaggtatcttgttggtaggaattcctttggtcagccttgtgtgggccatctttagccagatattcaagtggcagccgatgaactccggcttgaagtggacgctggttatcctttggattgtaagtgcagcttgcttcggaatctgttttgcagtgcagggggctactttcccggaattgggtatctttaatttctgagaatagtaatttcttttttaattgatatcgtgtttgtggaaatcagatttctataaacacgatatttttttattgggtgtaattggttgttatacagtgaaatattgcgtttggaaaaggcgttttttaaacgttcgtttaatgaacgcaaagataacgtgtatttttgaatctcgcaaaatgtttaataaaaatattctataaatttctttttagtgagtataatactttgtcagtaagcctattgcattgtatttctctaacttcttccttttactaatttttaagtaatcttccctctttaattttcttaaatattgacgttcaaaaaacgaacgtctattgaacgctttttgcttgcaatagattcgtttacagcattttacctgtcaggtaatgaatgactgcaaaaaatctgttgacaagaagggcataaagcttgtcgtattctacataaagtgtccgcaagtaattgaatttcaagtgtatgcaagaggttcaaagccccaggagaacacccttgtctgaacaaaagcataaaatgggaatagagaaagaggccgaaatctggtatgctatgcgtgccacctaccgcagagaaccggatgccatgcgtctgctaaagaaagaaaatttgggctgtttcattcctatgcaatacaagatatgtataaaaaaagggaaaaaagtccgtgctctggttccggtcgttcataatctgctttttgtccatgcccgtccttccgatgtgcagcgtgtcaagtctcaagtcacttatctgcaatatatcaccgatacccgcagtgggcagaagattattgtcccagacggtcagatgcagcgtttcattgccgtatccggcacttacgatgatcatcttctttattttcaaccggatgaattgaacttgtccaagggtaccaaagtccggattaccggcggtgaatttgaggggcaagaggggatatttctgaaggtaaagggcgcacgtgaccgtcgcgtggttatcgaaatacaaggtgtcatagctgttgccatggccactatccatcccgatcttatagaagtaatcggctgaactttaatttttaatttttaattctataattgcttatgtctctttccgaagaagcaatcactcttcagcgtgctgcgcacgaactgatgtatttgggtatggacggcagtcccgtctatagcgatgacttgtcacggcggaacggtgaggtctaccgtcttaccatggctttgtaccggtcgggtgtaaaaggcactaccatcgaagagcaggcaaatgtctgtcttgcccttcttatgggttacagcgcctcttttgtggaccatggcgaaaagcagcggcatgtccagaaagtgctggactgttgttgggatgtgctcgatgcccttcccgcttccttactgaagctccgtctgcttaccgcctgctacggtgaagtgttcgacgagtctttggccgacgaaggccgttccatcatcgcctcctgggattccttatcacttactcccgaacagcaggaagcggttgatgagtttcagaatgtgacagacaatccctatccgtgggaatatatcgatgaataaaacttttcattataatgcttaacaataaatccgtattgattaccggaggaacgggttccttcggaaagaagtttgtggaaaccatcctccgtgattatccgcaagtaaagaaaatcattatttactcccgcgatgagctgaagcaatttgagctgaaacagaaatatcccggtcataagtatccgcaactgcgtttctttatcggtgatgtccgtgacctcgaacgcctgacgcgggcttgcgaaggagtggacgtgattatccatgcagccgccatcaagcaggtggataccgctgaatacaatcccgaagagtgcatcaaaaccaatgtacacggtgcgcagaatgtgataaaggctgctcttgccaccggtgtacagcatgtggtggccctttctaccgacaaggcatgtgcccccatcaatctttatggcgccaccaagctcacttccgacaagctgtttactgctgccaacaatatcagcggttccaagaacatcaggttctccgtagtccgttatggcaatgtgatgggttcccgcggttccgtaatccctttctttatcaacaagcgtgacaacggggcgaaggaacttcccataaccgatatgcgcatgacccgtttcaacatttcgctggaagccggtgtcgctttggtcatgtatgccatcggacatcacctgggtggtgaaatctttattcctaagattccttcctatcatatccaggacgtggctaccgccattgcacccaatctgccgcaggtggaagtgggcatccgtccgggagagaagctgcacgaggagatgattactgtaaccgatgctcttgatacaatcgatttgggcagatattatgtcattcttccttccgtatctttcaagcacagtcgcgaagagttcatcagacatcacaatgcagtacccgttcccgacggtttccactacagcagtgacaacaatacggagtgggagacagtagagactatgcgcgagaatataaagaaatacgttgaccctaatttcgaggtgaaatgataagcaagcctattccatacggtcgtcagcatatcacagatgaggatatccgggcagtcatcgataccctgaaaagcgattacctgacacaaggtcccaaaatcagggaatttgaaacgaaatttgccgaatatgtaggtgcacaatatgccgtagcggtgaacaatgccacttcggggcttcatcttgcagctaccgcactgaatgtaaagccgggcgacaaggtgattgtcactcccatgacctttgctgccagtgccaactgcatccgctattgtggcggcgaggtggtattctgtgatattgacaaggatacttacctcatggatattcgtaaactcgaagccatgcttaaagcttctccccgcggtacttacaaaggtattgttccggttgattttgcaggctatcctttggatctggaagagttcagaaagcttgccgacgagtacggcttgtggattatcgaggatgcctgtcatgctcccggtggctatttcatggacagtaaaggcaagaaacaacattgtggcaatggttgttttgccgactgtgccgtattctctttccatcccgtgaaacatatcgctacgggtgagggaggcatggtgaccaccaacagcaaggagctctatgacaagctttgtctttaccgtacgcatggcattacgaaagaccctgctttattgcacgagcatcatggtggctggtattacgagatgcaggagttaggctacaattaccgtctgactgattttcaggctgccttgggtatttctcagctggagcgtgcgaaagcaggtcttgaccgccgccatgaaatcgtgagacgctataatgaagcgttttccggaatagatggtatcaagactccgttcaatgctgccgatgtctatcatgcttatcacctttatatcattcaagtagctgaccgcttgggcctttataattatctgcacgagaacaatgtctatgcgcaggttcattatgctccgcttcatctgatgccttactatcagcagtggagaaataggaaaggcgatttacctatagtagaagagtattacgaacattgtctgagtcttccgatgtatcccacgttgacggacgaggaacaggagtatgtgattgaaaaggttatagaatatataaaacaatgattacttccattcctattgaagctattgaaaagcagcttttgcagcaactttcctcttttttcttcttgagtgaagaagatgagatgttaataaatatgaaaatgggggggtgatatctcgttgtgaatattgtttttcccgtacgaaaaataagtattactcatgcgacggagagacatacttcaacccttatcaaagtgcacaatatacaatttttctctatttttttgctaacaccatttctcaagatactgataaccgtttattggcagataagttgtattatttgaataagataatgaatgggtgtgatttgtatcatgaggtaaatcttcctcattattttacgttggatcatccggtcggtagcgttatgggacgggctgaatatggtgaaggattcagttttgggcaaaattgcacggtgggaaacaataaaggaatttatccggttttaggtgaaaatgtgcggatgtgtgcaaattcttctattatcggtaactgccggataggtgacaatgtgattatcggggcaaattctggtgtgaaagatgaggatgtgccggacaattcaattgttttcgggtattctccccatttaattataaaggctaaacgatgaaaaatatctgtattattcctgcccgtggcggcagtaaacgtattccgcgtaagaatatcaaaacctttatgggcaagcctattattgcatactccattgaggcggctttgcagagcggactttttgacgaagtaatggtttcgaccgatgatgaagaaatagcggagatagcttgcggatacggggccaaagttccttttatgcgcagtgctgagacctcgaatgattatgccggcacggccgatgtaattcttgaagttttagagatgtataaagagcgaggcagggaatttgatacagtttgttgcatttactcgacagctccttttgtcactcctgaaaggcttcgggaagcatacggaaaaatgaattcggagattgactccgttttcacttgtgtggcttattcctatcctatacagcgtagccttcatattgtagacgggagaatcggtatggtttatcccgaatacatgaatacacgttcccaagatttagagccgatttatcatgatgccggccaattctatttctctcgtactgctccttttgtggagagccggactttttgggggaagaacacagccggactggtactttccgaactcgaagtgcaggacctcgatacgctgaccgactggacattggcggaaatgaagtatgagttacttcatagatgatgtaatgcagaaaatctatttccgtgccgacgcaagcgctaccatcggctacggtcactttatccgtactctggctttggccgatatgctgaaggacgatttcgattgtaccttctttacttgccatcctacctcatatcaggtaagtgagatggagaaggtatgtcctttcatccccttgcaagaggaaacgcattctgctgatttcctttcccatttgcaaggtgatgaaattgtggtgctcgacaattatttcttcactaccgattatcagcgtgccatcaagcaaaaaggctgccgcctggtgtgcattgacgatatgcacgacaagcactatgtggctgatgtcgtgattaaccatggtcagaccaattctgcacttttcgacgtggaaccttacaccaagctctgtttgggatttgattgggcattactgcgtagcccgtttatagaggctgtaaacaaactctgttcttgtgcaaaacgtagtacggaaagtataaccattacttttggtggtgtggattcctttgactttactggccattacattcgtgaagctatgcaattgcctactgtcagccagataactgcagtggtaggtgatgcttatcaacctcaaaagccgagggtacgggataggcgagtgtcttattgctccaatttaacagctcaacagatggccgaacttttttgtgcttccgattgggtaatctgttcagcaagtactgtgagtctcgaggccattgcttgtggtgccaagttggctgtaggttggtatgtagataatcaggctgattattattcactgttaacctctactggaggagttcttcctttaggaaatattaaggataatcccatacctctgacatctttagagattgctggggttgataacttgcagatacaaggtggtattcgtgaacgctatattaatctgtttgaagaattgggaagaaatgtgcattgacgataatcgcattctttttggaaaaattctcataatggacaattgatgcaggaatagaacagataattttaattatttagcaattgaatgatacaaatagacaaacaagcggtttataaatataatggttatgttttccaacacttctctattttgtcggaagaactcctaaagcaaatattggattggaggaatacttttgagataaggcagtttatgtataatacagatgtaatatctcttgaaaatcacttgaattttacgaaaacccttgctcaacgagaagattgttactattggttagtaacaaaagataatgttccctatggagtcttcaatctgaccgatatagaccatgaaagaagaatcgctgaattaggctattatatggcaccttcccaaatgaaaagtggagggggacttgattttgtttatactatcatctgtttttcttttgaggttgcaaaatgtataaaactggtaggttcaattgatataaacaataccgatgcattgttattggatgagtttttaggctttgttttgggtgatacggtggaatccgacggatgttgtcataaccggaaattcattgaatgggagctttcagaacttcattatagaagtactacagtatatagaaatgatatacgtaaattggtccgctttattagagataaacgcaaatagagaatcatgttatcaaattttcattttcaccatataggatacgctgttaccagtattgaaaaaacaatgtattattacattgatgggggatattcttgttcatctgtgatatttgatccaatacagaatgtaaatatctgtttccttacaaaagaaggagagcctatgattgaacttcttgaacctgttgatgagaattctccaatcaataaaaatcttgagaagaatggagtttgtccgtatcattgctgttatagtgtagaaaatatagaagatgccatcgcacggcttcgtaaaatgaggttcatggtggtaagctatccggcagaagcagtagctctcaataatcatcgggtagcttttctctataataaagatatcggtttaattgaattattagaacaaaaatgaaattctttatttttagaaacaatacgctggaaaatatcttcggcacagacgaagtggagtattctggttacgaagatatatcatatatacctcaaaatacatctttgtatttgtggatgtatcaaatacccataagatggaatcagaagcaactggctgacgaaattgatgcatatattagaaaaatgcagcttgttttctcgcaggttccacaagggaaagaatttgtagcattcacattggtagacatctttcctacgagatttactgatgccaattttattgtaagggaggctatcgtccggtataatacccaactgtataatatggctggaacgaatgtaaattttaaggtgattgacttttctgagtttacttcccgttataggtcagaggaattgattggatggaaattctattttatttctcaaatgtatatatcttctaaaattactagtgaatttgctacatgggtagactctaaaatacagaatatagctttaaagagaaagaaatgcctcattcttgatttggataatactttgtggggtggagtccttggcgaggaaggcattaatggtatacaaattggcggggattatccaggtaaggcatttttatattttcaggaagcgctgtctgcgttaagtaaagagggtattattttatctgtttgtagtaagaacaacgaagaagatgtattcgaagcttgggagcaaaatccgtttatggttttaaggaaaaaagattttgttgctattcgtataaattggaatgacaaggcttcgaatatcgtggaactgtctaaagagctgaacataggtcttgatagtatggtgttcattgatgacaatccggcagagcgtgaattagtaaaacagaccttgcctatggtggctgtcccggactttccaaaacaagcatatatgttaccgcagtttttcatgcaattagttcgtgattattttgaagtttacgaaattaccggtgaagataaaaagaagacggaacaatataaggcaaatgcggaacgtacacgcgaacaagccaaattcttaaactttgaagattttcttcgttcattagaaattaaaattgagcttcagaaggtggactcattcaatatatcacgaattgctcagatgacgcaaaaaacaaatcagtttaatttaacgacccaacgttattctgaagctgatgtcagacaacttctggataatcaatggaaaatctattgcatcagagtttcagataaatttggtgataatggtatcacgggagcagttttcatcgctgataatagtattgagaatatattgcttagttgtcgtatattaggtaaaggtattgaaacggctttcattaaatttgtatttaaattgttggttgaggatggtgtgtcagctttagaagcaaaatttattcctactctcaaaaacagacaagtggctgatttttatgaccggcttggcttttctgtgatgcgagtagaagagggtgttaaatactatatggcgaatattgacaaattagatttgtcaatacctgattattattcaataacagttaaacaataaagttatgattacgaatgaagaaataatggatgtgatgagagctgttttaaaaacagatgtagatgagaatacctctcagaataattgcgaaaagtgggatagtatgaaccatttgaatctggttatagaattggaagatactttcgaagtagagcttgagcctaatgaaatcagtttgatgaaatctttctctgacatcaaaaatattatttcaaacaagttacaataagaaccattatgggaaaaacatttatcatagccgagatgtcggcgaatcataatggcagcaagcagataggcatagaaacaattcgtgctgccaaacgtgcaggtgcagatgctatcaagctccaaacatatacagctgataccataacgttggataatgataaaatggagtttatggctgattctacaagtgtttgggccggcatgcgtttgtacgatctctataagcaagcctataccccttgggagtggcacgaagaattgtttcgtgtggccaaggaggaaggacttatctgtttttcatcaccgtttgataaaactgcggtagatttcctggaatccttgggcaaccccatttacaaaattgcctcttttgaaattacggatattcctttaatagagtatgccgccaagaagatgaaaccgatggtgatgtctaccggcattgccactgaagaagacattcagttggctgtagatacttgccgtgcggcgggcaatgatgatattacgctgttgaaatgcacctcctcttatcctgcccccattgaggaagccaatctgtgcatgataaaggatttagccgagcgctatggagtgaagtccggtttgtccgatcataccattggcagtgtgtctgccgtagtggctgtgacacaaggtgcaaccatgattgaaaagcattttattatcgaccgtagtattggcggccccgatgcctcattctcaatgaacgagcaggagtttgcccaaatggtgaaagatatacgcatggccgaagcggctatcggctcagtatcgtatgaacttactgataagatgaagtcgggaagggagttctcccgttcgctctatgtagccgaggatatgaaagccggagaagtgattacagagcagaacgttcgctccgttcgtccgggcttcggtttgcaccctaagtatctgaaagatatattgggaaagaaagtaaatcaggatttggagaaaggaacgagatttgcatgggagttcgtgaatagttag

SEQ ID NO: 74 - DNA, 12504 bp, unidentified
  source 1..12504: mol_type = unassigned DNA
atgagcaaaaagaattatgtggtcatggacggcaataccgccgccgcccattctgcctatgcctttaccgaggtggcggcgatctatcccatcacgccgtcctcccccatggcggagaaggtggatgagtggtccgccaaggggaaaaagaacctgttcggcacgccggtggacgtgatccagatgcagtccgaggccggcgctgccggcacctgccacggctccctgcaggcgggtgccctgaccaccacctttacctcctcacagggcttgatgctgatgatcccggctatgtacgccatgggcggacagttcctccccagcgtgatgcacatcgcatcccgtgttgtcaccagcaaccatcactccattttcggcgaccatacggactttatgacctgccgcaccaccggctacgccatgctgatgtccgcctccccccaggaggccatggatctggcggcggtggcgcacctgtccgccatcaaagcgaagtacgccttcatgcactgctttgacggcttccgcacctcccacgagatgcagcgcatcgaggcgctggactatgaggagctgcggggtctgatcgactacgaggcgctgaaggccttccgccgggatgctctgaatccggagcatcccaccaaccgcggcaacaacgtcaaccccgacgtgtacttccagtgcaaggaaggcgctaacgtcaagagtgccatcgtgcccggtaccgtgcagcactacatggacgagatcaataaaatcaccggccgggactacaagctgttcaattactacggcgcgcccgacgccgaggaggtcgtggtggccatgtgctccgtcaccgaggcactgcgggagacagtggactacctcaacgcctgcggacgcaaggtgggcatggtgcagatccatctgtaccgccccttctccgtgcccgatttctccgccgccatccccgccagctgcaagcgcatcgccgtgctggatcgcagcaaggagaccggctccgtgggtgaacctgtgtatctggacgtggtcacggcgctgaatcagaccggacgcggcgacatccgcgtggtgggcggccgctacggtctgtccagcaaggacaccactcccggccagctgatcgccgtatatgacaacctgcggcaggagacaccaaaaaacaactttaccatcggcatcaacgacgatgtgacccacacctctctgacctatgagaacgtggagttcccccatcccggcgagatctcctgcaagatctggggtctgggcggcgacggcaccgtgggcgccaacaagaacgccatttccaccatcggcctggtggctgacaagtatgcccaggcgtatttctcctacgactccatgaaatccggcggcctgacccagagccatctgcgcttcggcgacatgcccatccgcagcacctatctggtgtcctccgccgactttgtggcctgccacgcgccgacatatgtcaagaagtacgacctgaccgaggatctgaaggacggcggcacgttcctgctgaactgcccgtggacgacggaggaactggaggagcacctccccgccaagatgaaacgggatctggcgcggaagcacgcgcagttctatatcattgacgcggcgaagctggcggcggagatcggcctgggcaagcacaccaacaatatcctgcagggcgcgttcttcgccctgaccaaggtcatccccatggatgtggctgtggcggatatgaagaagaacaactacgccacctatttcaagaaggccgggcagaagatcgtggacctgaacgacaaggccgtggatgtgggcgtaaacgccgccgtgaaggtggacattcccgcggcgtgggcggacgcgcaggacgcacctgccgccgagatcagcgccacgccctttgtccgcgacatcgtactgcccatggatcggcagcagggcgacaagctgcccgtgtccgtgttccagaagcacggcgtgctggacggcacgtgggagaacggcacctccgcctattccaagcgcggtgtggccaccgctgtacccaagtgggacgccgcggcctgcatccagtgcaaccgctgcgccatgagctgtccccacgcggccatccgcccggtgctgctgaccgaggaggaaaaggcacaggtgcccgccggatttgtcaccgcgcccgccaagggtctgggcaaggacgctccggcgtatgccttccggatgcagatatcgccctacgattgcctgggctgcggcgtgtgcctgacagcctgccccgccaagggcgcgctgaccatggctcccttcgaggagatgaaggccgagcagccgctgttcgatcaggtggctatggacgagaagtacctgaagaaggatgtcatcagcgacaagagcgtgaagagcgcccagttcgccaagccctacttccagttctccgccgcctgcgctggctgcgcggagacgacatatatcaagcttttgagccagctgttcggcgaccacatgtatgtgggcaacgccgcgggctgctcctccgccatcagcggcggcgcgcctatcctgccctattgcaaggactgccggggtcacggccccgcgtgggagcactccctgtttgaggacaacgccgagtttgcctacggcttcttccacgcgcaggacgccatccgtaaggagctgctgctccgtctggacgccatcaagtccgcgggtattgcctcggaagcggcggaggcctaccagaacgggtggaataagcacgagagctcccgtgccgtcacagacgcgctgctggccgcgctggaaaaggcccagcagacggaggacgtgaaatacatccttgagaacagagcctatctgtccaagaagtccatctgggctgtgggcggcgacggctgggcgtatgacatcggcttcggcggcatcgaccatgtgatggcgcagaaccgtgacgtgaacctgctggtgctggacaccgaggtgtactccaacaccggcggacaggcatccaaggccacgcccaccagtgccaccgccaaatttgccgccggcggcaagcaggtggcaaagaaggatctgggcggcatcctgatgcagtacggctatgtgtatgtggcgcaggtggccatgggcgccgatcaggcccaaacactgaaagccctgcgggaggccgagtcctatgacggcccctccatcgtcatctgctactgcccctgcctggagcagcacatcaaggctggcatgagcaattcgcagctggaaatgaagaaggccgtggagtgcggctactggcacctgtaccgctatgatccccgccggatcgcggagggcaagaaccccttccagctggattccccggagcctgacacggacaagctcatggacttcctcatgggcgagaaccgcttcgcctccctgaagaacaacttcccggagaaggccgacgccctctacgccaaggagatcgccgacgtaaaggcgcgctacgccaagtacaagaagatggcgcaggactgagcgccgcctggcgctgatatctcatgcgctgcgggggaaccgcctgaccgcaggcggctcccccttttcaacgattcccttccctgcacagaaaggagacatgtacgatgtaccaaacgatacgctgcgaaaagcaagatggcatcgccatcgtgaccattgaccggcctgaggcgctgaatgccctgaacagcaccgtcatcgcggagctggagcaggtggtgacggcactggagagcgaccgcgacgtccgctgcatgatcctcaccggcgagggccgctccttcgtggccggcgccgacatcggcgcccagtatccgctggatctggacggcggccgccgctggggtcagcggggcagcgcccttatgcgccgcatcgaaaagctggagttccccaccatcgccgcggtcaacggcttcgctctgggcggcggctgtgagctggccctcagctgcgacatcattctggcctccgagaaggccaagttcggccagcctgaggtaggtctgggcattacccccggcttctccggcacccagcgcctgccccgccgtgtaggtgtggccaaggccaaggagctgatcttctccggcaagatgatcaaggccgacgaggccaaggagatcggccttgtcaacgccgtctacgcccccgaagccctgatggacagtgcgctggagatggccaagtccttcaccaagaacgcccccatcgctgtgaagtacgccaaggcctgcatcgaccggggtatgcagatggacattgacgacggcatcgccgtagagaacgagctgttcgccatgtgcttcgccaccgccgaccagaaggagggcatgggcgcgttcctggagaagcgtcccgccaactttcagaacgggtaaattgcgttatgaagctgaatcaagatgagatcaaaacgatcctgccgcaccgtgagccgatgcttctggtgacatcggtagaagatttgatccccggagaggatatccgcgccgcctttttcgcggatcctaaaatggacatctttctcggacacttcccggaagagccgatactgccgggcgtatactctatagaatgtatggcgcaggcggtggatatcctgctgatgtcaacactgcgctacgctggaaaaacgccgctccttttaggcgttgacaaggtgagtttccgaaaaaagatcctgccgggagacacccttgaaatccatgcaaatattatttccgagaaaagagaaaaagccatcgtcacttgcgctgctgaagtgtatgttcatcaggaatgggcagccaacggcgatataacaatagctatgcggtaaatttaaggaggaaacgaaaatggcattgatgaccgcgaaggagtacatcgactccctgcgtaagctgaacacccgtgtctacatgtttggcgagaagatcgacaactgggtggatcaccccatgatccgcccctccatcaactgcgtggccatgacctacgcgctagcccaggatccccagtatgaggatctgatgaccgccacctccagcctaaccggccacaaaatcaaccgctttacccacctccaccagtccagcgaggatctggtgaaaaaggtaaagatgcagcgactgctgggtcagaagacggctagctgcttccagcgctgcgtgggcatggacgccttcaacgccgtctattcctccacctacgagatcgatgagaagtacggcacccactaccacgagaatttcaagaagttcctcatctacgtgcaggacaacgacctgacggtggacggcgccatgaccgaccccaagggcgaccgcagcaaggctccccatgagcaggccgatcccgatatgtacgtccacgtggtggagcgtcgccccgacggcatcgtggtctgcggcgccaagtgccaccagaccggctccatcaactcccactggcatatctttatgcccaccatcgccatgggcgaggcggacaaggactatgccgtgtccttcgcctgccccaccgacgccgagggcctgtatatgatctacggccgccagtcctgcgacacccgcaagatggaggagggctgcatcgacgtgggcaacgccaagttcggcggacaggaggctctggtggttctggatcacgtctttatccccaacgagtacatcttcctcaacggcgaatatgagttcgccggcaccatcgtggagcgcttcgccggttatcaccgccagagctacggcggctgcaaggtaggcgtaggcgacgtggtcatcggcgcggcggcgctggctgccgagtacaacggcgtggagaaggccagcgctgtcaaggacaagctcatcgagatgacccacctcaacgagaccctgtactcctgcggcatcgcctgctcctgcgagggctgccccaccaaggcgggcaactatcagatcgacctgctgctggccaacgtctgcaagcagaacgtcacccgcttcccctatgagatcgtgcgtcttgctgaggacatcgcgggcggcctgatggtcaccatgcccagcgagacggacttcaagtccgacaccgtggtgggtaacaacggcgagaccatcggcgagatctgcaacaagtacttcgccgcccgcgagggcgtcagcactgaggatcgccagcggatcatgcgcttcctggaaaatatgtgtctgggtgctgccgctgtgggctaccgcacggagtctatgcacggcgcaggctctccccaggcgcagcgcatcatgatcgcccgtcaggggaatattcaggagaagaaaaagctggcaaagaacattgccggtatccagaagtgagagggcggcatggataagaagcaagcatggctccagctggtgcgggagaagtccgagcactatctgaatctgcacgacggcggctttgacgagaaaatgcgggcgcgtctggtgggctgcgattacgaggcgcagactgtcacctacgccttccccacccaggactggcagatcaacgagaagggcggcatccacggcggcgctatcgccgggatgttcgatacggccttcggcgtggtagccaacttcaccgccggagacaacgaggccaccaccacggacatgacggtgtccttcctgcggggcgtggatttcggcatggagctgcacctgacggtgttcatcgtcaaggcggggcgcagccttatccgccagcgggcggagctgaccgatgccgccaccggcaaactgctggccaccgccagcggcagttggatgccgctgtgaccacattatacttaggacaaaacaaggagaacaaatatggatttcaatctcagccgtgagcatcagctgatccgcaagatgatggcggagtttacggaaaaggaagtcaagcccattacggcggagaccgaccgcacctgcgagtatccccgcgagaacatcgagaagctgtttaatctgggcgtcatgggtatgtgcgtccccaaggagtacggcggcgcgggcgccgatccgctggccagtgccatctgcatcgaggagctgagcaagcagtgcgcctccaccggcgacatcgtggccacccacaacggcctgtgctgcgatcctatcatgacctacggcaccgctgagcagaaggccaagtatctgcccatgctgaccaagggtcaccatgtgggcgccttcgccctgacggagcccaacgccggcagcgacgcctccaagggtcagaccgaggccaagctggagggcgaccactatgtgatgaacggcagcaagatattcatcaccaacggctatgtggccgacgtgttcgtggtgttcgccatgaccgacaagagtcgcggtaccaagggcatctctgcctttattgtggagagcagcttccccggtttctccgtgggtaagcacgaggaaaagctgggtctccacggcagccccaccgccgagatcgtgttccaggactgcatcgttcccaaggagaatctgctgggcgtagagggcaagggcttctccatcgccatggcgaccctggacggcggccgtatcggcatcgctgcccagtccctaggcatcgccgagggcgcgctggccgaggccatcaactacaccaaggggcgtgtccagttcggcaagcccatcagcaagttccagaacacccagttcacgctggctgacatggagctgggctgcgaggcgggccgcctgctgacgtatcaggccgccgtggccaagggcgagggcaagcgctacaccaagctggccgccatggccaagctgttcacctccgagcacgccatgaagaccaccaccaaggtggtgcagctcttcggcggctatggctacaccaaggattacccggtagagcgtatgatgcgggatgccaagatcacggaaatttacgagggcacctccgaggtgcagcgcatcgtgatctccgccaacatgggtctgtaagaggagggaatagacaatgaagattctggttaccgtaaaacaagttcccgacacctccggcaaagtcgccgtaaatcccgatggtactcttgaccgtgcgtccatgcagaccatcatcaaccccgatgacctgaacgctgtcgaggccgctctggctctgaaggacgagctgggctgcaaggtcgtggcgttcaccatgggtcctcctcccgccgagggcatgctgcgtgagctgatggccatgggcgtggacgaaggcgttctggtcaccgcccgtgagttcggcggctccgacacctacgctacctcccagatcattgccgccgctatcgatacctacggcatcgagaaggacgacatcatcctggctggccgtcaggccatcgacggtgataccgctcaggtgggtccgcagatcgctgagaagctgcatctgccccaggtcacctatgccggcgagatcaccaaggacggcgacaccctgaccgtgaagcgcatgctggaggacggctacatgaccatcaaggtcaagaccccctgcatgatcacctgcatcaaggagctgaacaccccgcgttacctgtccgtgggcggcgcgttcgagtgctacagcaagcctctggtcaccatgacctatgagaccctgaaggatcaccccctgatcgacaagagcaccatcggtctggccggttctcccaccaacattctgacctccttcacgcctcctcagaagggcgcgggcatgatgctcgagggcgctgacaaggctaccaccgacaagctggcaggcatcctggccgccaagcacatcatctaaggaaggagaaaagaaaatggcttttaatagtgctgataccgctgccttcaagaacgtatgggtgttctgcgagcagcgtcagggcgtgatgatgcccaccaccttcgaactgatctccgagggccggaagctggccaatgagctgggtgtcgagctgtgcggcatcctgctgggcgacaacgttgacggcatcgccgccgagctgggcgagtacggcgccgacaaggtgtacgtgtacaactcccccctgctgaaggactttaccaccgatgcctacaccaaggtgatcgtggaggccgttgaggagctgaagcccgaggtgctgctgttcggcgcctccaacatcggccgtgacctggccccccgctgcgcggctcgcctgcacaccggtctgtgcgcggactgcacccacctggacatcgacatgcccaactacaagggcttcctgcgcgaagcttctaccctgcccgaggagcgcatcgagaagctgggcaccgtgatgatcaaccgtgagccccacgatgtgtcccgcgacctgaagatgacccgtcccgctttcggcggtcacctgatggcctccatcatctgcccccgcttccgccccgctatggcgaccgttcgccccggcgttatgaagaagcgcgagtgcaagaagaacgtggagatcctgcatcccgcttttgagctggctgccgctgacatcaagaccgaggtcgtggataccgtcaaggccgccaagaagctggttgacctgatcggcgctgacttcatcgtgtccgttggccgtggtatctccaaggacgtggagggcggcatcaagctggccgaggagctggctgaggtcctgggcggcgtcgtgggttcctcccgcgcctgcgtggacgccggctggatctccgctgaccatcaggtcggccagaccggtaagaccgtccatcccaaggtctacatcgcactgggcatctccggcgccatccagcacaaggccggcatgcaggattccgagtgcatcatcgccgtgaacaagaacgacaccgctcccatcttcgaggtggctgactacggtatcgtgggcgacctgttcaaggtcgttcccgagctgatcgagtccatcaaggctgccaaggccgccaagtaactacgcttttttccttctctccttacattgcggattcactccaagacccgcgggcaggcccctcctacatcacatccaatacatcccatctttcatctcggcgaaccatggtttatggaaagcttgctcatctctacctgtaccaattttagcgactttcagcctgctccgggtctggagcatctgcaaccggcagtatgctttgagtagaaaaattttattagtgcttcgaggcgaagcataatctctatgagtttgatgtaggcaatgagtccggatggatgtacaaggtcaacggctggttccccaactacggctgttcccgctatcaggtagaagacggcgacgtgatctgctgggtctacacctgcgatttgggtgcggacgtaggtgataactctatgaacggttgagatcgtcagatgcggcttgctttagaaaaagagggagatgggactttggcactgataaccaaagccccatctccctctttgcaaagcagttttgacagcctcaacagaaagcgaatggttatttttcggtggcatgcaagtttaccactgaatgcatagaccttccctacgcggcattaattagatttaccagatattggatggtgttatgtgtcgggcttttttaggctgtaaagagctgctccagagtacagcttgagaacttgtagtggggcaaacggccagtgactatgcggaatgcagcggctatgactgcctgcgccggacattacgcagttcttcacacgcaggaggtcactggttcgagtccagcagtctccaccaaaaagttcctgatttcgcaagaaatcagggacttttttgcatttatgccctcaaataatgacgcggcattttggcgtttttcgcatgacccaaaccgtgacccaaaagccgagaggtcaggaaagcgccggagaggggcggatggcatcatccgtccctctctgtctgttttttgtgggctacatggtctggctgatgacgctgccgatggccttcaggatcttctcatgggtgtgccggaaggagtccggatcgaacatggtgccggtcttgggcgacacaaacaggtagggactgtgtggatgctttgcgtgttcctccaccggcaagaataccggcagcctgaccgacatccaaaaaccaagctgtgatccacctaagaccagtaaccaccaagggagggacttccgtccctcccttggtggttgtccagcagtttgccgcaatcggggcgggcttatgccggcaggttgatatgaccgattttatccagcgcagagagatcaacgctttccacatacgctttgatctcgtcatcgccgagagagtcacccggctgagaaaccaggctgataaatgcgttctcgccgttgtaaaggacaataaactgatggttgccggagtaaacagacactgtctcgccacgcgcggtggtatacgaccattcatggtattcatgggcatcatccagagaaaggcagtcgatgctcatgctccccttcacccgacggtttatggcgatggtgcagaagcgttcctcctcgccgcccgtacgccaatcatccccgaaggagaaggagccgtcgttccatacccgataatcggggacgccctgccgtgacgggctttccagcgtcaaaaagccatcgctgccgatgatctcgcaaaagctcgtatatccggagccttcgtatagagcgtcccacggcttgagatcgtatttctcgctgatctcaaggaacttgttgaccagtgtttcggtgtaaagaccgttgtagacccttcgatgggcttcgccccagtcgcccagaggctggtgcagcgcatctccgttatagccgtttgcttcgtaggcgctgaggaaggcgttgaactcgcgggaggcctcgtattcgggggagccgatgcagccctgcatgctgatggtcattccgtcagccagctttttgcctgcatattcaccgttcacatagttgtcggaaacgatctggctgcccatcacagcgtctctgataccaaacagattcaccgcgtaggcccctgcgcacatggcgcacaaaagcgctatgacagccgccaccagtaccgatcttctgacagttctctttttgtgaatcgtatagttttccatgttcataatctccttttcggcatcagatgcctcaaccgtctgcatcaggtcgatggcatccagtataaacttcggatcaatattgttgaacccggacagaaagtcaaacgatgtcatagcaatccctccttagataaatatagccgtaatttctgcctggttcggaaaagtgaggtttttactttgctttgtgaacacttgaacctcaaggcaatgtccgctatggaagcaaagaaccagtagcgacacacaaagatatttcggtcgtctgctgagagtgtgcaaagaaattgattgaccgccgcggcaaactccttcctctcgcattccgcttccacggaatcaccggaagcgatggtgtccttcagctcgtccaatacaagatcaaactcaccgccgccgcgtttccgggcgtactgctcccgcaacttcat

SEQ ID NO: 75 - DNA, 7441 bp, unidentified
  source 1..7441: mol_type = unassigned DNA
  misc_difference 4747: note = a, c, g, or t
  misc_difference 4748: note = a, c, g, or t
  misc_difference 4749: note = a, c, g, or t
  misc_difference 4750: note = a, c, g, or t
  misc_difference 4751: note = a, c, g, or t
  misc_difference 4752: note = a, c, g, or t
  misc_difference 4753: note = a, c, g, or t
  misc_difference 4754: note = a, c, g, or t
  misc_difference 4755: note = a, c, g, or t
  misc_difference 4756: note = a, c, g, or t
  misc_difference 6452: note = a, c, g, or t
  misc_difference 6453: note = a, c, g, or t
  misc_difference 6454: note = a, c, g, or t
  misc_difference 6455: note = a, c, g, or t
  misc_difference 6456: note = a, c, g, or t
  misc_difference 6457: note = a, c, g, or t
  misc_difference 6458: note = a, c, g, or t
  misc_difference 6459: note = a, c, g, or t
  misc_difference 6460: note = a, c, g, or t
  misc_difference 6461: note = a, c, g, or t
ttacttgctcgccttcgcggccttgaaggcctcgatcagcatcggggtgaccttgaacaggtcgccgcagatgccgtagtcggcgatctcgaagatcggcgcggtgtcgttcttgttgaccgcgatgatgcactcggactcgctcataccggccttgtgctggatggagccggagataccaagagcaacgtagaccttcgggtggacggtcttaccggtctgaccgacctgatggtcggcagtgagccagccggagtcgatggcaacacgggagccgccaacaacgccgccgagcacatcggcgagctcgtgagcgagcttgatgccgccctcgacgtccttggagataccacggccgacggagacgatgtagtcagcgccgatcaggtcgacgagcttcttggcagccttgacgacctcgacgacctcggtctggagatcggcggcgtcgagcttgacgtcgtacttggtgaccttaacggccttggccttcgcctcgtcgtaagcagccttcttcataacgccgggacggaccgtcgccatggagggacggaagcgcgggcagatgatggtagccatcaggttgccgccgaacgcgggacgggtcatcttcaggtcgcgagagacatcgtggtccttacccatgaccttcgcggtggccatgccgtcgatcttggcctcgggcagcgtggaagcgccgcgcaggaagtccttgtagatgggcatgtcaacgtcgaggtgggtgcagtcggcgcagagaccggtgtgcagacgggctgcgcagcgggggccgaggtcacggccgatgttggtcgcgccgatgaggaaggcctcgggcttcatctcggagatgacgtcgcagatgaccttggcataggcgtcggtggtgtagttcttcagcagggggtggtcgcagacgatgacctcatcagcgccgtagccgccaatgctctcggcgagatcgccgacattgtcgccgaccagcagaccgcagagcttcacgcccagctcgtccgccagcttgcggccttcggagatcagctcataggaggtggacatcatctggccctgacgctgttcgcagaagacccatacgttcttgaactcttcgatcttggaggagtcatagttgggattagcaagtttcacttcgttacgcatcgtattgatctcctttccttaaatgatgtgtttttcgagcaggatgccggcgagcttctcgcaggtagccatgtcgttgccctcgagcatctgaccggcgcccttctgggggggcgtgaaggaggtcaggatgttggtcggggagcccttgaggccgatggtcgtggcgtcgatcagttcatgatccttcagcgcctcgtaatcgaggaccttcatgggcttggaatagcactcaaacacaccggagacgctcatataacgcggggtattgagctccttgatgcaggtgatcaggcacggagtctgagccttgatggtcatgtagccgtcctcgagcatgcgcttgacggtcagggtgttgccttccttcttcacatcggcggcgtaggtgatctggggcaggtgcagcttctcagcgatctgaggaccgacctgagcggtatcaccatcgatagcctgacggccgcagaagacgatgtcgtcgtcatcgagaccgatggtgtcgagagcggcggcaaggatctgggaggtggcgtaagtatcggaaccgccgaactcacgggcggaaacgagatagccgtcatcagcgcccatggccatcagctcgcgcagcataccttctgccggcgggggacccatggtgacgacggtgaccttgcagcccagctcatccttgagcttgagagcggcctcaacggcgttcatatcatcggggttgatgatggtctgcatggaagcgcggttcagggtaccatcgggattgacggcaaccttaccggaggtatcggggacctgcttaacgcaaacaagaatcttcattatatctttacctccttttttagttcacaccaagatacttggcaacgaccatacgctggacctcgctggtaccctcgtagatctcggtgatcttggcgtcgcgcatcatgcgctccacgggatactcacgggtgtagccatagccgccgaagagctgaacagcgcggcgggtgacgtcggaagcggtctcggccgcgaagagcttggccatggcagcgtccatggagtaatcctcgtgattctgcttcttcatagcggcagcgtaaacgaggtactgggcagcctgagtgcgggtgtgcatgtcggccagctggaactgggtgttctggaactggctcaggcggcgaccaaactggatacgctccttggtgtacttgacagcctcgttgatggcgccttcggcaagaccgagagcctgggaggcgataccgatacggccgccgtcgagggtcttcatggcgatcttgaagccttcgccttccttaccgagcaggttctccttggggacgacgcagtcttcgaagacgaggtcgcaggtagagctgccgcggatacccatcttcttctcgtgcttaccggtggagaagccggggaagtccttctcaacgatgaaggcggtgataccgtggttgcccttgctcttgtcggtcatggcgaacacgacgaaagtggaggcaacgttaccgttggtgatgaagcacttgctgccgttgaggacgtagtcgccgttctcgttcttgacagcggtggtctgctggccggaggcgtcggtaccggcgccgggctcggtcagaccgaacgcgccgatcttgcggccggacagaaggtcaggcagatacttcatcttctgctcctcggtgccgttctcgaaaatgggagcgcagcagagggaggtgtgggcggaaacgataacagcggtggtgccgcaaaccttagcgagctcctccacgcacatggcataactgagaacatcgccgccggcgccgccgtactgcttcgggaagtaaatacccatcatgccgagcttggccatcttttcgacggtctccatggggaagcgctcttcctcatcgagttcctcagctaaaggcttgacttcattttctgcaaattcgcgatacattttgcggaccagcagatgttctttggacagatggaaatccatagtcttttgctccttcactataaaaataattggattgtctaattattcacaaatcagttccatgactctcattatatcctgtgcgtttcattttcgcaaggggaactatcattcctttttggaattcgtgctttttgccgaattcattaaagtctttttgacatttccgttccttttatgacagttttctgtcattttcaggaatcctttccattccaaaagagaaaaggggaggcagtttttgtaaactgcctcccctttttatccttttagggacggattacttcttgctgtaatcgtagaagcccttgccggacttcttgccgagctggccgccgcggaccatcttcttgagcagcagagcgggacgatacttcggatcgccggtctcgctgtagaggacgttcataatggcgaggcacacgtcaaggccgatgaagtcgcccagggcgagggggcccatggggtggttcgcgccgagcatcatggccttgtcgatatcctcgacagaggcaacgccggtctcgaccaggccgatagcctcgttgatcatcgggatcaggatcttgttgacgacgaagcccggagcctcagcgacctcgacaggctccttgccgatctccttggagaggttgtagatgaagtcgaaggtctcctgcgtggtgttggcgccgcggatgacctcaacgagcttcatgctgggcacggggttgaagaagtgcatgccgatgacggcgtgcttcaggccgagacccatctcggtgacagacagagaagaggtgttggtcgcgaagacggcgctctccttgcacatctcgtcgagctcgccgaggagctgacgcttggtgtccatgttctccgccacgcactcgatgacgaggtcggcgtccgccgcggcagacttctcctcgacgaggatgttgttcaggatggcgtccttggcctcttcggtcatcttgcccttctcgacacgcttctgcagggaagcggcgagcttatccttgtggcgctgagcggaagcgacgctggaagcgtacatcagagcggtgtggcccttggccgcgaagacctgagcgatgccgctgcccatggtgccggcgccgaaaactgcaactttcattgtgtgtatcctcctacaatataaatagataattctatggaatcacttgttgataaagggctcgtgcttgcgcttttcgaggaaggcgcccatgccctcctgctggtcggcgctctggaagcaggagccgaaggccttctcctcgatcacgacggcgcggtcaatatcgacctgaagaccgtcgttgatggcctgcttggacgcgcgcaccgcgatgggcgcgttgccagcgatctggccggcgagcttttccgccgcggcgtagaggtcagaaagcggatagaccgcgttgacaaggccgatgcggtaggcctcgtccgccttgatgttgcgggcggtgtagatcatctgcttggccatgccggggccgacgaggcgggcaaggcgctgtgtgccgccaaagcccggcgtgatgccaaggcctgtctcgggctggccgaagacggcgttatcggagcagatgcggatatcgcagctcatgnnnnnnnnnngacgccaggcgaatatcgcatgccatcgaaagctcgcagccgccgccgagggcatagccgcccaccgccgcgatcgtcgggatggggaacgcttcgagcttgcgcatgacgtcgttgccctgcttgccgaaggcctcggcctcctccttgctgagctccttcatctgcgcgatgtccgcgccggcgacaaaggacttctcgcccgcgccgcggacgatcaggcagcggatctcgcttaagtccaccgcgtcgagcgcggcatcgagatcggcgagcacctgagaattgagcgcgttgagcgccttttcgcggtcaatgatgagataggcaatgttgcccttgggttcatatttgacaaaagacatcgtgtgtctcctcctgtcttcttcaactgccccctattatatgggcggcaaggcatatttgcaagagaaaaatcacttttttcaaaaaagtttcacacttttccggtgtcattgcaagaaacgttgcatttttaatgatcttttctcccaatgcagcaactcttgtataaaatttttaaaatgacttgtctcttgcaccaattttcgatatgataggctttaattataggaaaacgaggttcattctatgcgaatgcgcaaaaagaaaaacctgcttccccgcatggagcggtgcggggcgtatcagatcaaggacccctacgagcgcaagggccgctggcacgacttgatgcccgaggcgaaggagatccgcgtggagctcggctgcggcaagggccgcttcaccgtcgagacggccgcggcggagcccgacgtgctgctcatcgcggtcgaaaaggtgcccgacgcgatggtcgtcgcgatggagcgcgcggcgaaggcagagctgcacaacgtcttcttcatcgacatcgacgccaaccagctccctgagatttttgatcagggcgaggtcgaccgcatctatgtcaacttctgcgacccgtggcctcccaagcggcaggccaagcgccggctgacgcacggcaatttcttgaagctctaccgcaaggtgctcaaggacaacggccaaattcatttcaagactgacaacgacccgctgtttgagtggtcaatcgaggagatcccgcagtttggcttcgaactctctgaggtcacacgcgatctgcacgcgaacggacagcgcggcgtgatgaccgactacgaggccaaattctatgccgagggcaagaacatcaaccgctgcgtcgccacgatgcagccgtgggaagagcccgaggaagaggatacgcccgaagaggcggacgaaacggctgaataagataaaaggaaggttgactttgtcagccttcctttttgctttcttccagatacggcgaatacatcatcaccgcgtcgttcacggcgacaggcgtctccgcgagcagattgccctgcaaatccaacgtctgccggtagagctcattgtggcggatgtagccgccccagtactgcgcgcgcatctcatggctgcgctcgacgaccgcatagcgctcggtcggctcggcgctcacgcgccactcgccctcaaggtctgttttgccgacgcggacgcgcatctgataggtgtcctgtgtgtcgttgcggatcatcaggtcaagataggggtaaaagcaggtcgcaccgctgccgaacggctgcgtgcgggtcgcgtcgggaaagacgtcgtagcnnnnnnnnnnggcggtggcgctcgacgaccgtgagcggcgtgtgcagcgtcatccagtagatgaggtttgagagctggcagagcccgccgcccgtcgcggccagatacccgccgttgcgcaggatcataccgggcagataccccttccccgccgtcggctttccgatgagataccagtagctcatcgtttcaccggggcgcagcaaaagcccgtcgagccgcgcacaggcgaggcggagattcgtcaccttgttgcgctggagctgcatgtcgacgtccttgagctttcgcatgagcggcgtatggtgggaaaacgccggatatgctaagtcttccccgctgcgctcgcgcgcaaaatgcttccgcatcgaaagccatctgagttttcgctgcgcgctgaaatacgcgccgccgagcttcagccgcaaattagagcgttttttcggttcgcggacggtcatatgcttccctcccctgtttttctgcttttatagacgcaaaacggcgggaaaaagttccaacattttcttatttcaggctcatcacgtagatttgacacgggttccactcgtcccagagcgtcgggaatacctcaaactcgccaaaaccgagggcgagatagaagcggttcgtcgcgtcgtactcagggtacttccccatctgcacggtcttgacctgcaaaaacgagtagccaagctccttcgcccgctgcttcgctgcggcaaagagcatcttgccgacgccgcggcggtggtattctttcagcacgcccatgacatagagttccgccgtatccctccccgtttcggcaaggtaaaggaagccgacggcgttctcgccgtcgaacgcggcgaaaaacggctgcttaacactcttttcgatgtattcctcgcgcgcctctggaatgccaaaccagtcgggcagcgattctaaaatcaagcgcgtaatgcgccgcttttcatcgggagtcgtaatttctctgatctccat

SEQ ID NO: 76 - DNA, 5760 bp, unidentified
  source 1..5760: mol_type = unassigned DNA
atggcaaaacgagtaggaaccgcagagtttgaagcggaagtgctgaaagagaagcttccggtgatcgtagagttttattctgacagctgcatcccatgtaagcagttatcaccgattcttggcgggattgaggatgattacgaggatcaggtcaaggtagtcaaggtcaatgtgaatttcgatgcagaccttgccggggaatatcaggtaatggcatccccaacgatacttttcttcaaggatggcagggaagttgaccgtatccgcggattggtaaagcgtccggagctggaagataaggtcaagagtatactggaataaggtagaacagttaattacaaacaattatgaaactggacttaactgaatagagttgcacataattactaattctaaagcagaccattgaagcacgctggcacttaacgaacggcaaacttgtttgacgtgagtttagtaccattgcgtgatgaagtgagcgagagcgcgtctgcgtagaaatagtaattatgtgtaacgcattaaataagtatatgtttcataattgtttggaacaaaggaggataaataaatgacagttgtagtggcaggcgttaagaaggaagtagaagcaggaacaaccatcgcaaagctcatcgtagacgagaaggtggaaaatccggattatgtaacagttaccgtcaacgatgactttgttgacagcgacgcatttgacaagacagaactgaaggacggagatacggtagagttcctgtacttcatgggaggaggcgcattttaatggcatttacgaatgaacagatggaacgttacagccgtcatatcattctgcaggaagttggtgtaaaaggacagaagaaactgatgaacggcaaggttctgatcatcggtgccggaggtctcggtgcacctgcagcaatgtatctggcagcagccggcgttggtacgatcggtattgtcgatgccgatgaggttgacctttcaaatctgcagagacagatcattcatggaactgcagatgtaggcaaagcgaaggtaaaatccgcaaaagagacaatgaatgcgatgaacccggacgtcatagtcaatacataccgtgaatttgtaacctcagaaaatatcatggatctgatcaaggattacgatttcatcatcgatggaaccgataacttcccggcgaagttccttataaacgatgcctgtgttatggcgaagaagccattttcccatgcaggtatcatccgtttcaagggccagcttatgacatatgtgccgggagaaggtccttgctatcgttgtgtattcaagaatccaccaccaaaggatgcagttccaacctgtaagcaggctggtgtcatcggtgcgatgggcggtgtcatcggaagcttacaggcaatggaggcaatcaagtacctgatcggtgtcggtgatctgcttactggtaagcttctgaccttcgatgcattgaagatggaattccatacgatcaagcttccggataaccataagacatgtgcaatctgtggcgaccacccaacgattcacaagctgattgattatgaacaggtcgagtgcgacggaaagtaggtagagcaatgttagtcatgacaaaagcagattacgagaagattctggggcattgcaagaaggggctgccaaatgaatcctgtggattgatcggcggtgtcgttgaagatggaaagaggtacattaagaaggtgtatctgctcacgaatatcgatgcgagcaacgagcatttctcgatggatccgaaggagcaacttgccgcagtcaaggacatgcgagcaaatggataccagctgcttggcaacttccattctcatccggaatccccatcacgcccgtccgaggaggacaagcgtctggcatatgattccaaggtaaattatctgatcctctctttgatggatttagagaacccggtattgaatgcgttccatattgatgaggaaaaaaatgtgaccaaggaagaacttgtaatcgaataagattagttgagcggcaggaaggggattcctgccgtttctgcgtggtgagctgacaggatgtgggcgtagcgagcgggaaacgggctgaaaaacccacgagttgggttcgggagacagaaaagccggcagaaaccccagaaccggaaactaaatcgtagaagtggagcaggatgtgggcgtagcgagcgggaaaagggctgaaaaaaccacgacgtgggtttcggagatagaaaaccaagcagaagacccagaaccggaagcaagagcaatttctaaggttgattgaaagaagaatgtcaattataatatgtagtatgtatatgaataaaaacagttaacaggaagaagcacctatgatatgcatcagtatcacacataagaatttaacagcggcgaagcgggagtgctttgcctgcaatgatgaggaacagataaaactggcaggtgccgtggcgaagacatatccggaagccgggttggttttacttatgacatgtaatcgaagcgaaatctatatgagcggcacggacacggatttcgtatggctggaacagcagtttgcggatacaaagaaattcccggtcgaggcgttgaagggtgcggctatgcggtatgaaggaaaaagctgcctgacacatctgtgccgcgtagtctgtggactggattctgctgtgcttggagaggttgaaattataagacaggtcaagcaggcgtatcttgcggcgaaagagcgcgggcagaccgatgcggaaatgaatatggtatttcaaggggcactgcggcttgccaaggaagtggctgagacttcacagatgacgcatcttccggtatccgtcggaacacttgcatgtacggcggcgttggagtctggtgcgggaaaacatatcctcatcatcggagctgccgggcagatgggaagcatcgtgatgcgggatctgctcgatgcggatacgcaggtacagatcgtcgggacgagccggaagcataagcaggcattgcagaaaatcctctcacatgagcgggtgcaatgggtgcattacgaccaacggtatgaatatctaaactgggcggatgtgattattagtgtgacggacagtccgcattatacatttcttgcagataaggtagcggaagtacggaaggaaacgaaaccacagttgttcttagaccttgcgattccacgggatattgatgcagagatcggaagactttccagctgcgtcgtgaaagatctcgactatatcaagtcgcttgcgacggaaaataaccgaaagaaactttccgaggcaaagaagattgaattactgattgaagaacatgtggacgagatgcagaagctgcttgcatttcgtgcatttgtcgggacgaggaaggacatcacggagaagcttggcgagaaatccgcgatgtggcttttgtaccagttgaaagacgttctggatgcacaggacttaaatcacgtattaaaagggatagaagatggcgtattttccattcatgatacaactcgatgataaacaatgtctgatcgtaggcggcggtgcagttgcagcgcggaaggcggcacagatgtgtgagtttggcgcatgtgtaacggtggtagcaccggagatctgcgcggaactgctggctatcgcagatacggaacgaatagatgaaacagcaggcatagtagaaaatattgatggtaattgccagaaaaagccggaacgaatccgggtgtggaagcgggaagtcacagaggcagacatttccggcatggacgttgtaatcatggcgacagatgatgcggagcttaattcgcagtatgcggagctttgcagaagtaagcatatattggtaaatgtggtcgatgtgaagaaggattgtgatttctatttcccggcaatcatcaagcagggggaggtcgttgtttcggtgtctaccggaggcaacagtccgatgcttgcatcgaagatcaagaaggatatccggcagacacttcggacagactatggtcagatcgcggatgagcttggagctatccgggagaaaattctggcagaggagccggatgaacgggcaagaaaacgaagatttgcagcaattgtggaggcaaaaatgcaggaacagagaatccggatcgggacgcggggaagcagacttgcgcagattcagacagatatggtgatcgaacaattaaagaagcattacccggatgtgcggtttgagaaagtgatcgtgacgacaaagggtgacaagcagaaagaggcggcaatcagttcctttggaggcaaggcagtgtttgtagaagaaatcgaggaagctttgctggatggtacgatcgatttggcggtacacagcgcgaaggatatgccgaatccatgtaagaaggggcttggcattgcgggcgttctgccgcgtgcctgcgtgcaggatgtgctgatctatcgtgcggatacggatatccggtcgaagaatacatttaccgtgggaaccggaagcttgcgcagacgcagccagattaaggagatatacccacaggcagagtgcatggaacttcggggaaatgtcacgacgcgcatacagaaattgcgggatggcttatatgatgcgatcatccttgcggcggcgggaatcgaacggttaggtatcgagaaggaaccggatcttgtctatgaatacctcgatgtggatgcgatgcttccggcagccggacagggtattattgcgatggaagcgtgtgaggggactcttccgtatcatatggcagagacaatcagtgatgcggagacagagggctgtctgcgtgccgagcgtgcggttgtccgtgagatggaagcgggctgccatgagccaatcggtgtatatgcgacatggaaggatgacaagactatgcaggtgcgcgtgatgaatgcccggagtggaaaggtcaagcgggaggtgtgggaacgagaaaaggaagacgcaaatgatcttgaataatggggagaaagcatataatcgtgtcaaggaagagaggtgcggatctatgaaaataaaattcgacaacataactgcaaaaactgcgaaatactgtgcacttatatttacggtgctgttgcttatcggtctggttttttcatttctcgaaatccccggtacagaggtgttctatatcatggctgtttatacaggtgtgcttgtaggacttccgtgttatgttgtgcttttcgctgcaaagctgtattttgcccgtttgcgggcctacggctacgaaatcccggataataaaaaaatatatgggaataatctgaacaatcttccgaagacgcgtgaggcaggaagatcgctttttgcaaagcacagccggattgggatgtggatgtatttcgcatgctttgtcttgtttctggtggtggatgtgatgtatctgatcaaatggcattttatgaaggggcattttatgaaggatatctgtacatttctgttcaccgtgtgtctggttctggacagcgtctggcttattcttgcggtaattatgtggcggcagagaaatacagagaagtaccgggatgatgtggaatgtgacaaaatgcgcaaagagcgcctgaatcttgagaatattattgtatttgcaatcttctgggcgatcgtctgtgcagttgcatgtattcaggcggtgacgacaacgaaatatatggataaggtgcagagggagaatgcacaagtggctgcgtctgaattaaaaatggcggataatatggtggaattaggaaattatgaatcataa

SEQ ID NO: 77 - DNA, 16449 bp, unidentified
  source 1..16449: mol_type = unassigned DNA
ctattctgtggcagtattaattaaaccgtttttctgcctctttagcgatttctgtcttgtctccaccttctctgcagcttccttgttttctgcactgacagagatatagtttttcagcttcgactcggtatcggaggagcgcaccacaagagaaccgttatcttccagcagggacttgagcacgtcagacttcggcagaccatccagacccggagcgtaatccagcagcttaacgaccttcttgccgccgaacaccttgatggcgccacggaatgcctgcataatgttctgcatcttggcaaaaccggcgctgccgtcaaactcataattgtgcagattgttcaggcaatatccgtaagccttgtacaactcgtccagcaggctgatgcccttggtcgcatagtagctgaacatctcacagatcatgtacgcaccgtctacgccgtctttgttacggacgtaggagccggtcaggtaaccacagctttcctcatagctgtctttcttgccctgcttttccaacttaccgatctgctcgcccatatccatggtgacgatcgtcttgaccataaccgggtcaacaggcatcttgccgtgcttcacacgctgactgcaattataatccagcagcatgccggtctggttgccggtcagcagttcgtactccactgccttattcttgacggcgatgcccacacggtcacagtcagggtcagtcgccagcagcaggtcagcgttgcacaccttagcatatccaacatttgaaacatcatatgtctttactgcgtcaagaatccgcaatgccagaagcgtctccactcattcgtcagttaaataccatacatgagatagtcaaaaacgctaaccgtcaaaatttcagtcatattcttttcctcaatcagtccatcatgcccgtattataccactgaatcatacgctcataatcgtcctgcgtatccagatctcttatgcgcatcggaactgcctttagaggaagaagtggttgcagcatctcatcaattccttgtgcccctgcaatcaaccggctcgataaaactttggaaaggcacccccattcatacttacttgggctacgtaagaattcgtttacttcattatttgaaacagccaagtaaattggttcacttgagtgtgcttcacatacacttatacattcctgtggctcactcataaatcgattgaaatcgtccctattaataagtaaatcgccatccataattacgacgtattttcgcgctccaattaatgtcttagataagctcacccctgagcctgtcttacgataatcattattaaaagcaaacattacatccttacggatatgctttacctccttgataaccttttctgcttgataaccaacggaaacgcgaatatcatcatactcatcgagcatttccagctgacgctgtataatagacttaccagctatttttaccagtgcctttgttgtcccaataccaagtctagtgcccattcctgcacaacagattacaacgctaatatcatcgtgtcccataatcatgtttccttctaatctttttatagaagcgtcctgagaaaatccgcgcatctattatcgtcgtaaaatgcataatcaatattctgaatcagcgatggcgcaatatccctaataccaccaaaaccaactgaaatattagcaactcgtgccataccagaatcattatctccatcaccaataacaacaagtggctgaacaaactgttttgcagtcaattccttatcaataacactgactacttgcgtgattttatcgtctttatagtttgctctagagcaatacacatgatcattgaggccgagtttgcgcatcaaatcattgatccaaatatctagatttccagttacaacgtagcacctatcacgattttcccttataaactgtgcgatattctcattcaagggtatctcagctaccatcgctcgcgtttctgatacattcataacgcttaatatttccaccctttttaggaaactactcttaaatggaatctctccattcatggttgcttccgtaagttctcgcatttctttttgtctatttaccttttctgcaatagtaggtaaaatttctttacgtgtaattgtcgaatccaaatcaaataaaaatatatactcagacatctctttcaatcctattctcagaactcagcattgcatttaatgtctccgccaattttcgaataaacatatcattatccgcttcatttctgatggcaattcttaaatattgtttctttcctttgattttcttacttagagtcttaataaagacctttttttcaagcaacattctctgttttaattcttctgcatccaaaccgtcaagcaattctaccataagatagtttgcttgagatggtattacacgtatatatcttaggtcttgaagctttgatataaatctagctctttcttttctaaatttatctagcgactttatatatgaatcacgatacttaccgcaaatctgcatataaaattcagcaaacgaatttatattccagattgatacatccaccttcatccttgaaattaatcctttatctccgcttgccaagacaccaagtctcaatcccggcacaccgtacgatttagaaatactcttaatcacgtatagatttggatattgatttaaaatttcttgatcaatcaaagatgaatttatctcatcagaaaaatcaacaaatgattcatcaataattatcttaatgcccttatctcttgcccacgatatcatcctcagcatatcgttcttaggaatataattacctgatggattatctggattaaccaatacaaggttagaaatcgtagttttgccaaagtattctataagatcactcgcactataggaaaaatcttctgattctaccagataattaaccgtttcgatttcagtatatctgttgggatattcatcaaacgtaggtcgaacgaatccagttttcccttttataaatcccatcattgacttaattagctctgcagcaccgtttccaacaataatactttctggagaaaccccaaatgcgctcgctgctagttccgcattaactctcatccctgacggatattgttcaagcaaaactttaaaattattctgcagttcctcaactagttcacgtggcggataatatggtgtcacaagataaaaataatccagatattcaggatatctccaatatccgccccaacttcccagcattttatccgcaatactttttttatcttttgaaaaaagaattgtagcctgatttacgtcctctgtattattgatttcacgccatacagcattgcttacacgcaaggccttaatcctcgtgtcgtttgacattgcaatcacattcaacggtacagaatattccagactatctcctagcacatcaattatgttttccaataccggaacaaaatatttttttgtaaaattcatatcaaatttgcaaattccaaccatccgacacgaattcaactgataagtcgaactcaattgagattcttgtccaactgacaaaacacgagcattttcgtcaacaaatactggtttgcctgtcatccaatttttataagtatctactgatacaacacattccccatccgtttcaagtatagatttgagaagattatcttccagcacaagctgagaatttagaataacagtatcatccattgacagatgttctcttcccaagaataccgagtaaatactctttgactctttgtaaaacttattttctaaaaacacaagttcagtctttaagtttaatcccttgctgaattcaattagactttctttattatttccagtaacgagaattatttttgaaacaatactattgtctagctgaatcaacattctttctattattggaactccatcgatttcaaccatccatggttcattactttttcccaatccagtcagacccattatctctcgatccgctaaaatgagtgcctgcattatgctccccttctctcgcttttaatttcaatctcaaatagacgactatcagaagcacaaatttcttctccgtgaaacctagtaatcagtacttcctccacaccatcttattgactacattcacatacccctgaataatgcgaactactttcatagacacagtttcatccatatagtcggggcagggcttgcccagaacgcccttctgcttcatctcaatggccatatcggtggcgttgagaagttcccgggtggtaatgccagccagaatgaagtcaccggcttccagtgcctccggacgctcggtggaggtacggatgcacacggcggcgatgggatggccaatggacagatagaagctgctttcctcaggcagagtgccagagtcggagacgattgccaaagcgttcatttgcagcttgttgtagtcgttgaagcccagcggctcattgacccggacacgtgggtccagctggaaaccgctcttttccagacggtgcttgctgcgaggatggcaggagtacaggatgggcatatcatacttctctgccagagcgttgatggcggtaaacaggctcaggaagttcttttcggagtcgatgttctcctcacggtgggcggacagcagaatatacttgtccttttccagccccagacgttccaacacattgcttttctggattttctccagattcatgtgcaatacctctgccatgggagagcctgtctgataggtacgctccttgggcagatcagtatctgccagatacttccgggcgaactcggaatagcacatattcacgtcagagatcacatccacgatgcggcgattggtctcctcgggcaggcactcgtccttgcagcggttgccggcctccatgtgaaacagaggaatgtgcagccgcttcgcagagatggcggacaggcaggagttggtatcgcccagcaccagataaccctccggctgcaactcggacagaagctcatagctgcgacccagaatgttaccgcaggtcacgcccagattctcgcccaccacgggcaccagaatatccggaccatactccccgaatgtgttcttcagttcaaaatcctcccagaaaacggtggaaagatttctgtcccagttctgattataatagaccacgcagcagtcaaaatactcccggcagcgcttgataacggcagccagtcggatgatctccggacgggtgccgcagccgatcatgaccttggtgcgtccatcatttttccatgtaaaattgtgttccataaaaatctcctaacgtcaaccagtatcttctcttacaccggctcgaagaaggtgtccggatggttcgggtcaaaaatttcgttgcaggtcatcaccgtcaccagattctccgtctccgacaggttgataatgttgtgggtccagccgggaatcatgtggacagcctcgatcttgtccccagaaacctcaaactccaccgtttctccggtgttgatgtttcgctcttggatcaggccgtgcccagccactacaatgaacagctcccacttggagttgtgccagtgctgccctttggtgattcccggacggctgatgttgatagacacctgaccgcagtcagcggtatgcaccagttccgtgaaagagccacggttgtccacgttcatcttcagggcatacttgaacttgtcggtgggcagataggtcagatacagggagtacagcttctttgcaaaggagccatccggcatcttcggcatcatgagggtcgtgggctgcgccttgaactcctgcaacagatccacgatttcgcccagcgtgaccttgtgggtcgcgggaacgcagcagtagcgaccgtctgccttcagaacagtctctacaccgtcaaactcgcagtgctgctccttgccttccagcaggtcgaacatcccttccacaagatcgtcgatgtacagcagctccaactcggtgctgcggtcgttgacggtgaagggctcatcattggcaactgcccagcagaaggtgctgacagcactgttgtacttagggcggctgtgtcccatcaggttcacgaaacggtagacggcaacctttgcgccggtctccttggcgtagtcgaagaacagctcctcgccagccttcttgctgcggccgtactcgctgttgccaaagcggcctgccaacgtcgcctgaatggaggaggacagcatgatggttgccttgttgttatactttttcaggcagttcagcaagtcagatgcaaaaccgaagttgcccttcatgaaatcttccgggttctccgggcgattcacccctgccagattgaacacgaagtccgccttgcggcagtactcgtccaactcctccggggtggaatccaaatcgtactcgaagatttcttcaatattcaatgccgggcgggtcttattttttccatcccggatgtttttcaggttgttgcacagggcggttcccaccatgcccttggcacctgtgactagaatgttcatcctatcacctctttaatgtactgcggtgcagtccggaatatctgcgccatccagcacggttgcattattgcagatggtgcagttgctaccgatgcgggcaaagttccccaccgttgcgccggtgcgaacaacactgttggtgtaaatcaaagcgtagtcccctaccgctgcatcacagtgggcctctgttccggcattcagcaaaacaccgtcgccaacggacgcaccgttctggacacaggcattttgcaataccacgcagccacagcccaattttgcgtatggactgatgtaggcgctgggcgcaacgatattgggaaaagcaaagccaagggtcttcaccttctcatacacctgtgctcggaaccgattattgccgattcccaccaccagcaagccatactccttccgcagctccggcagatcagcaagaccgccaaccactggaatgccgcaaatctcaacgccaacaggctgtccatcatccacaaaggcacagtcatattggagcatcgcctgctccgcaaccatacgcccaaagccgccagcgcccaccagcagcagcttttccttagacattggggatgcctttcagctcattctggacatattcagtggtcagaatcttcttcacagtgccctccacatccagacgagtggtattatggctggtgtaagattcatctgccatggtatgtacttcgcccttgaccacgaacttatcatagttcaggtcgcgattatccgcagcaacacggaagtaatgacccatatcctggctgcgcagacgctcctcacgggtcatcagagtctcgaacagcttctcgccgtgacgggtgccgatgatgttcgtgccggtatcgccgaacagctgctgaacagccttagccaaatcgccgatggtagaagcatcagccttctggatgaacaggtcaccggggttggcgtgctggaaagcgaacatgaccagatccacagcctcgtccaagttcatcaggaagcgggtcatgttggggtcagtgatggtgatggggctgccagccttgatctggtcaatgaacagagggatgacagagccacggctgcacatgacgttgccgtaacgggtgcagcagatggtggtgccgccacgctccgcagccacacgagcatttgcgtagatgacgtgctccatcatggccttggaaatgcccatggcgttgatggggtaagctgccttatcggtggacaggcagacgacacgcttaacgcctgcgtcaattgcagcgtgcaagacgttatcagtaccgatgatgttggtctggacggcctgcatggggaagaactcgcaggaaggaacctgtttcaaagcggcagcgtggaagatgtagtcaacaccgggcattgcgtcacggatagactgggggttgcggacatcaccgatgtagaacttgaccttcttggcgttctccgggtgcttggcctgaagctcatggcgcatatcgtcctgcttcttttcgtcacgggagaagatacgaatctccttcaggtcagaatccaagaagtgcttcagaacggtagaaccaaaagaaccagtaccaccagtgatcataagggttgcgttatcaaatgcagacattttaattttcctctcttactttgcttcaagcgatttctttatatcagaagaacaaattccctctgttctctttaaacgaacaactcttttgttgtgctcttcacaccactgctctaccgcgtcaaaacgtccaccacggtgatcttcaccaagcgcaagaatatcaaaatcaattgtccctaaaaattcaggatcaacagattcatacaccactactttgtcaacgatccgcaatgattcaagcatttccacccgttctgcggtcgtatataagaccttagcatccggtttatacttcttaatataatctccgtcttgaacggccacaattaaataatctccataatttttgcactgtttgaacagtcgcagatgtcccaaatggaagtagtcatatactccaaatgtaagaattttactcatcatcattttcttctttcatttttcaatataaacaataacggatcgtatactgttgcatcaatatcattcttatacctttcataaaaacaggtattctgtacatccccaaatcaccgggcacttatttgcgcgcgcaagttgttggaacgacctctcgatttcgggcgaatgctcgccctgtttcaccacctcaatacactctctcaaaagtgcataaaaagctcgtccgaaatggaatttcacctcgcatagttgcttctgttaactgccacatttcatcaaattttccgattcattttgaagattccagtaaaacctctttacgcgtaattatggaactcgacatttcctcacgctcactacccttttacttctggtatgctttatacatatgatgggatactcttttctcttcgggaggaagttgcatataatcgccgtaaaatgcgtttagccatttatcatatccaacaggtgcattgtactctcttccctcaaaaggaacctttatgaatgaagaaaaaacatccttttcacaaacaattctgggaacagaagtgaaatttccgactgccgatgtattcgtatcagcatatttctttgaattatcaacaatctttttggaaaagtatcctttcgggaaaatcttcaaaacttcaaagccaaccgtttttacaatgtcttttataattccatgcgttccaacaacaccattttgaacagcatttaattttgtataccaatctcctagtttgtacatttctgcaactttttggttgctttcaggagcattgtcatagacaaaaacgtcaatattcacactgatcttcatgccgttttcatctggttcatacaaaacagtttccgtgtccagcacttttccataggggtaatagaaactattgccaagctcccgacaaataaatttatagcgaccattcgcttgattaaaaatattcataaatcggtcaaaatccggccgcaacattccaatatcaatatcatcatcccaaggaatataccctttgtggcgaattgcgccaagtaatgtcccgcaatccaaccagtattgaatttggtttttctcgcaaaaatcagcaacggtatttaaaatgccaagctgatagatttttacttcttcttcgttaagttgtttcatatgattctccttaataggcaatcaactatttgaccttctaagtcttgcataatggttatctcttttctctagcgaatagttgctaaccgatagtttttctaaatctaagcgaacgcttgatgacgtggccttattttgaatctcaatttttcgaactcggtagatttttccgtttaaatttataagtgtgccctcacggagtttaacaacgctattttgcttcttttcgacatatgcaagattgtcataacaacttccataaaattcttgactggagaaaaacatttcaggtgtagcaaccataccggtagaaatatttggctcttcccacaaatcttttagggtatctagaaattttgacggagttttaagatgatgctcgagagtgatataaaaatgtgagaaatctttttgctcaattatgctaacgtgttcttgtgggacaggtagatattttgtggcgtctgaattttcagattttgtgtcattttgactctctctgtatatttctttactttgttcaatgggtgtgttttgagtgacattctccatcttggtatgttttcttttccatgccaatcttaatagcaaaatcgcaccaattaggacatacccaactacaagtgctattgcccagaggcttacatcagaaaagtttgtgataactttttcaatcaacatacggagcgcacctccttataaatcgaaactgccgcacataaaatccaggataatatcccaaatgcaagaagcaaaaaagcacatgaggtttcctctctatctgacaatggaacaccaataaatgcactacggtacactactatataatttatagcgaaaataaagaatgaaaccaaaagccatcctttcaaaaatccgtgaattttatcgacctgattgttttcaaacaatgtcggccatactattccacatacaagtgctccaacttcgacaagttcattgctggaagcttttccgtaaacaaaatgaaaaacaagaaacacacaaaatgtgcatcctgaatacaagaatgagcgagccgcccatataataagcaattttgttatatgaatcgctctttgtaatgccgattctactttatcggtttcttttgcattcttttcctctacttccgtcacgatatcctcctgttacttcccatattggcttagtaaaactcttttctatatttccaacaataccatccgcggcttgccataaggacaagctccgttacacagcggaataccgcgatccacatcacggtaaaatgccccgttgcaatcagcaatagcaggcttgccacctgaacaacggcagacagaattgttgtttttgtcacctgtgcggccttgtccagtgcgcccaatgtcggccagcccagcacgattcccggaaaactgaaaatcagtactggcaccaatgcgcggaacagagaagtcgctgcaacatactgctcaccaccaacaatctgaagtacatacggtgctaccgcaatcgagaacgcgctgcctgcgaacacaatgggcataaaaatcatcagaagccgcttgataaacttccagctttttgtcttgatcatctctgggtaaatgccatccgtaataggggtatacatcgtctgcaccgcgccaattagctgcatacagacactccaatatgcaacttccgttgctggaaggaatgcgccaatcagcagcgtattcaatgcaccaaatgcagttgttgccatgttggaagcaaaatagacaaacgaattttttagctttttccacgctgtgcttacactggaaaagtgaatcttaatgttttctttcttcagttcaacaaacacaaggataacagccaccagcgaaccaactgcatccagtaagggaacaaacaaaatgtccttatccgagtggacaaaaataaaagtcaatgctgttgcgatgccgcgcatagcgacaaagcgcagcgtgatgacctgcattttttcgatacctcggaagaaataatcaaacaaaaacaccgacaaaaacactgtcacaaatgccaacagcgtatatccgatgttggcgcgcagcaggggaatcaccgcaatcattcccagcagggcaacaaaagccgccgccgccaacaaaacgcgggcaaggagaatgtcaccaacttctttttccaatttttcgtggtcgttcttcgcgtttacaatatcctttgtgccggacagcataaagccaaaatctacaaccaactgcatatactgcattacagcttttacatacgaaaccacgccgtagctttctacagaaagcacacgggtcagatacggcaatgtcaaaaggggaaatacgattttggcgattgacataccatagagcattatagtatttttaattacattgcttttcacgtttcaactacctctacattataattttcttgtgcggaggatatacaaccaccaatcataaataatggtatccaagaacagtttgtatatagaatggtaggaactgaaaaaccgactatcaaaaacaccattaaaacagataatgtatagcagctaagttttctatcaggtgtatcatttatttctttaattgcaataaaaaaaagcaatgcaaacaataccaatccgcaatatcccgtatttataagaacttttacatatgtgttatgctcgttcaatcctgaatatccaaatatttgattgaagttcattgctgctccaaatattttcgtaaaaatattttgtctgttaaatgctgttagtaacaatgtccagatttcatttctgccctgagtattgcttgcattcatcaaatctgataatttatcgaaatgcaagctgagtagtcctctatcctgaaaaaatttggtgtttgaaacaaagcgaagagcatatatgcaaactaaaaacgcacacccaagcatcaaaacatttttgaatgaaatgatttttttattttttctatactgaaagaaaataaataaggcgacgatagtgcatagataaataattcgtgcgttacaaagtacaattagtaccactgcgatagcaagaggaataaaatctgttttttccatctttttgttataaatccatgtgattagaaagtagcagagcatgacagcaaaatccgttttgaaaaaatacattcctctatatgtgacagctgacccccatactattgttccttttccggcgaggcaaacaataagatttataactagagcaaaaagaagcgatgatgttaagctctcccaaaccgtatcaatatcttttacatagaatctgcctaaaaagtataaaagcagcgaagaaatgattttcaaataatcaagatatagttctggtgatttaagccatgatcccgtaaacatcaacgcaatcaaaataacgattgtatcactgatacaaggtttcagagggaatctttttgttattgcaattataagcaatagaatggcaaaagccgttattataacagtcagcatttttagctgataaaacatatcaaatattatttttagcatccagaaaatatatattggatgtgtatggattttcactttaagttgtttcatatttacagaaatttctaatcatcgaatttttgtgtgttcatttagtagcgataaccatataaacttagaattagtcaccaaatatcttctaaataatcttttgggttccttcatgaagcgataaaaccattccaagctaatatcctgcatccattgaggtgcttcatcaattacgccagagacgacattaaatgctccaccaacgccaatcatgaggccgttgatttttccttgcattttatagcaaaactcttcttggcgtggagcacccaaagcgacccagacaatatctggattggtttgatttattcgagctatgagcgcattctcctcttcttcactgagcggacgaaacacggaaggctcatatccaactacttcaacccatggatactcctttttgattttctcaagaagcgcatttatattttcttgcgttgttccataaaagtaatgccgaattttcttttctttcgactcttcaaaaagccttcgcatcaaatccggtccggtgacacgattcatctgcggaaatttctttcttccaattacagaaagtggtttcccgtctggcacagacagcaaagactctgcttgcaccttataatattgtggatcatcatgtgccataactgtcgtatgcacattggaaacacagacgtaatttccatgtacagcatcccaattggagaataaaaaggaaatacaactctccatattcactactgaaatcggcacaccgattatatttacgcgtgtaggaatattctttagtttgttacaatgtatcatatattttatttagtctttcatagtttgaagcaggtgtctggttgcacaagtaatagttataagcattaaacgaaaatttcgttcgttgttcataaactgcatccaacgctttcctaaaagagcccttgacttcaaaatcaaatagagttcctgcatttgattttgaaactaagtcgccagcatttccaatacttgttgatacgaccggtactcccaaagagaaacattctgcaatattcatagggtagccctcataccatatatagggcgtaatcaatgcgactgcggattttaaggaattgaataattctttttgtggacagaatccattcaaatgaatgttcggacatttagctgctaactttcgaacctcggctgcgcactcaccctctccataaacttcaagtacataggtgcccggcagattgatccattcattaagcagttttagtattccttttcctttatcaagtcttccggcataaatatatgttcttacccccccccgaacaaatgttcatatatatcgttttggagaacataatttttatcttttgacagtgtttcgctgtaataggccagtgcatttttctgatatattttgttgttctgcaaaacatcttcaatagcatttataaatgtatcgggcttgtcaggttcaaatgttgttccaccttttgaattgacaagaatatctcctgcattgcctatatttgtcgatacaacagggcaaccaatggccattgcctctgcaagaatcattgggaagccttcataccagatacttggaaatacaagtgctgttgcagttgataaatcttcaaaaatagttttctgtggagtaaatccgtaaaaggaaatattctctttcacattttcttcaacaaaatttttgagagttccatctccataaatgtgcaggcaataatccttaggaagcaacttccacaattccaaaaggagttttattcctttgttttcttcaagtctacttgcaaaaatgaacactcgcttgtgtgctcctttgcttggctccccttttctgcttacaaaattaggttttacgaatacctgatttgaatttatatcgatgagtttatcgaatttacttttgttgaattcggtcaaaaagatatatgatatttttttatagattcctagttttctgttaaccgttaacattgctgcaacaattattgttccaactgtagagtttcgataacatttgttttttattgcttctttgaagtttccgttctcgcggcacttttcgcacaccttgcctttgcagtaaaaagacccattcgggcagagaagtctgaaattatggattgtctgaaccacaggaactttcatacttcttgcagcataatacacagatggcgaaatcaatggaaacgtgttatggcaatgtacaacatcgatttgttcgttctttatcagttttctgatttctatataggttctaagagaccacactgttgtaaaaggcaaaaagagcaatttccatttatcagatttcagctcatcgttgctacgcgtatactctattacttcatggccattatctcgaagcagttctacttcgtttttgaaaaccgtatgttctccgccacctatttgataaaaattatgaaccattaagatttttttcttttttcccacggctattctcccaatctttatgtaagctgataccccttactccccacgccccagcaggcacaccttaaacgtcttaaaaataattttccaatccacccagaagctacgctccttgacgtatttcacatccagatccatccactcctcaaaagagaggtcgttgcggtgcggggcaatctgccaatagcagctcaagccgggagtcacatacagacgctgcttttcgtagtcgccgtactgttccacttcgcggggaagtgccgggcgggggccaacgatgctcatatcgcccttcaggatgttccacagctgcggcagctcatcgatactggtcttgcggataaatttacccacacgggtaatgcgggggtcgtccttaatcttgaacacaggaccatccatctcgttctgatccagcaggtcatccagctttgcctctgcattggggcacatggagcggaacttatagaacttgaagggctttccgttgcggccgatgcgttcctgactgaagacagggccggcagacgggtcatccaccacaattgcaatagccgtagccagcatgaccggcgacaacaccaccagtgccagcgatgacaagattacgtcctgcgtccgacgcccgatccagtacaggcgatggtcgcgcagattttctttgcggtcaacttcaacttccttatcgattccgacagtattcgtagccat

SEQ ID NO: 78 - DNA, 5631 bp, unidentified
  source 1..5631: mol_type = unassigned DNA
gtcgcggacgttctccccgcggccgtacacgggcagcggccttcggtggcggatattgttgatgaacagcgggatgagcttctccgggaattggtagggcccgtagttgttcgaacagttggtcaccagcgtcggcatcccgtacgtgtcgtggtaagctcgcacgaagtggtcggacgaggctttcgaagccgagtaggggctgtgcggcgcgtacttcgtctcttcggtgaagaactcctcgccgaagggcccgccgccgctctccccgcccgcagcatctccctcgggacgggtcagctccagcgccccgtacacctcgtcggtggagatgtggtagaacaatttgccctcccacttgccgtcccagtattcccgtgccgcctcgagcagcgagagcgtgcccaggacgttcgtccgcgcgaaggtgaacggatccctgatcgagcggtcgacatggctttcggccgcaaggtggatgaccccgtcgatgtcatactgcccgaacagcgcccgcagcatatccaggtcgcagatgtcacccttctcgaacacgtagttcggggaatcctcgatgtcccgcaggttggcaaggttccccgcataggtcagtttgtccaggttcacgatccggtaatccgggtatttcgtcacgaacaggcgtactacgtgcgagccgataaagcccgcgccgcccgtaatcaggatggtgcgttttggtgccattatctcgtatcttatatttgattttctcgttcggaataagtttccaccatttcagcaaaccgggaagaccaggccggccagctcaatttttctttatataatctccttgcattttcagacaatccggaaaattcctgcttgcatatgcactcctttatcttgttggcaaaatcggctcccgtacctgtcaggggaagcctgtatccgttcacgccgttcacgacataattagctattccgccggtatcggtcgtgaaaacggggattccgtaagccgcagcctcgcaatacacgatggcagagcattccgcgcgtgtcggcaacaacagaatatcggcttgctgccaaagttgcacatactggtgatattgttcgggaatattcttattcaaaaagccgatgtttttaacatgcggattatcccggtgtttttgaggcaggtctttaatacctgcgacatacagcgtcgcacggataccggcggcattaagctgcatgaccgtatctacagcaatctcgccgcctttccgctcccagtcgaccccggaaaacagtatgcggagcaaataccccccccctgcaaactcctgtttaacaggagtttgtatcttattttcatcgatattggcaccaaactctatcacattcagtttagacgccggaatgtggtaataatcccgggccgagttactcgcccattcagaagaatgaataattaccgaagccttatccaaagcccgctgttcgatggagtttccatatctgacgctgcatgcggcgaggttcggccaataatagtcgaccatcagttcaaaggtggcatcgctgaggtagaataccggtttatccgtttcgatccgggacagcacctgggagcctccgctgaaaaacagcatgtcgcatcctgcaatcagttttttatcgatgctgtgcgcttccatccgggcaatcagcgggatgtgggagtagacgatattctttcccgtaagttttgcatacaaatggtacagtcccaggataaacttggaaaaaaacggggtggtataggggatccatcgcaccgtatatccggcctgttcgatcgactcccggatcttgaaaattgtgccgctccatgccttccggtcgatgaaggggtttgccttactgacatagccaaaagttattttcgccatatctattgtcgttgaagtcgtttcatgcagtagatcaaggcctccctccagtgcgggatatccatttggaaggtctccttgaagcgggtcttgtccagcaccgagtaggccgggcgggtggccttcgtggggtattccgacgtgtggcaggggatgatacggcacgtgtcatggcccgcggccgcggcgatttccaccgcgaagtcgtaccacgagcacacgccctcgtcggtgaagtggtacaccccctcgttgcccgtgtagcgccccgcctcgatcagggagaagatcgcaagcgccaggtctccggcgtaggtcggagtgcccacctggtcgaagaccacgcgcagcgtctcacgctccgaggtcagccgcagcatcgtcttcagaaagttgttcccgtactccgaatagagccacgccgtgcgcaggatcaggtagcggcaccccgaggccttcacggcctcctcgcccgccagcttcgtacgcccgtaggcccccagcggcgaggtcgccatatcctccgtgtagggcctgtgccccgtgccgtcgaagacgtagtccgtcgagacgtggatcagcgtcgcacccgtctccttggccgctgccgcgaggtatgccgcggccttgtggttgagcaggtcggctgtcggttcatcctcctcggcacgctccacgttcgtgtaggccgcacagttgacgatcacgtcgatacgctgttccttgaccgtttgaagcaccgccccggcgtcggtgatgtccagctccgcgacgtcggtggccaggtagttgttgggcgacacgctcccaagctgccgcagcgagctccccaactgtccgttggcgcccgtaatcaggatattaagcatagtagtccgtattatagtcgaacagttccgcggcctcttccagccgcgggtggcaactgtccttgggcgagaggacgacatcccccggtgccaggtgccagtcgatacccagcgcggggtcgtcccacgcgatggcgccctccgattcgggggcatagaggttgtcgcacttgtattggaatacagcctcgtcgctcagcaccgagaagccgtgcgcgaagccccgcggcacgaagaactgccgtttgttgtcccccgagagctccacggagacgtgccgcccgaacgtgggcgagccccggcggatgtccacagcgacgtccagcacgcggccccggacaacgcgcaccagtttcgactgtgcatgcgccccccgctggaagtgaagcccgcgaagaacgccgtacttcgacatcgactcgttgtcctgcacgaaccgcacggggcgtacgagcctgccgaaggactgctcagaatagctctcgaagaaataaccccgagcgtccccgaacacctcgggttcgaggaggacaactccttctatttcggtagggatgactttcatggctttagcgtcggttttcgtcggtgagtttcaacaggtactgcccgtactggttcctgagcatcggctgcgccaactcccggagcttagcggccgtgatccagccgttatggtaggcgatgccctccaggcaggcgatcttgaggccctggcgtttctcgatgacctccacgaagatcgaggcctcggccagagagtcgtgcgtacccgtgtccagccacgcgaagccgcgctgaagcgtctgcaccttcagctctccgcgctgcaggaacgactggttcacgctcgtgatctcaagctccccgcgcgccgagggccggatacccttggccacatccacgaccttgttcggatagaagtacaggcccacgaccgcgtagttcgatttcgggtgttccggtttctcctcgatcgacaggcagttgcccgccgcatcgaactccgccacgccgtaacgctggggatcgtcgacccagtagccgaagaccgtagccttgccatcctcctcggccgtgcggactgcctcgcgaagaaggcccgtgaagcccgagccgtggaagatgttgtcgcccagaaccagacacacggagtcattgccgatgaaatccgcgccgatcaggaaagcctgggcaagaccgtccggggacggctgctcggcatacgtgatacgaaccccgtagtcggagccgtcgcccagcaaacggcggaaaccgcccagatcctctggcgtagagatcaggaggatgtcgcggatgccagccagcagcaaggccgataaggggtagtagaccatcggcttgtcgtaaacaggcaacagctgcttgctgacgcccttcgtgatcgggtacaaacgcgttccgctgccgcctgccaagatgatgcctttcataggtttctgaaattaatatgcgttctcatcctgccgcagggcattccataccgtcatgaagatgatgcggatgtcgagcagcagcgaccagttttccaggtaccagatgtcgcggcgtacgcggccttccatctggctcagggagtgggtctcgccgcggtatcccgtcacctgggcccatcccgtgatgccgggtttgatcaggtggcgaaccatatatttattgatgagtttcgagtattgctcggtgtgctggagcatgtgcggccgcggccccacgatggacatgtcgcccctgagcacgttgatgaactggggcagctcgtcgatgctcgaccggcgcaggaaatccccgaaccgggtcttgcgcgggtcgtccctggtcgcctgcaccctgtcggcatcggcgttgacgcgcatcgaacggaatttaatgcacctgaacgtctggccgttctccccgctgcgctcctgcaggaagagcaccgggccccgcgaggtcagtttggtgcctatggccacgaaaatatagatgaaggggaacagcgtgcagaggaacaggctcgatacggtgacgtcgaatgcccgtttgataaaccggttcgacgcctgccgcaacggctcctcgcggatgtagaggatcggtacgttgcccagcagttcgaggttcatcgtgcgcttcatgtagttgcgcaggttgggcacgtagaagaagcggacgaagttgttttcgcagaaatccatgatcgggaatatctcttccgcgtaacgatccgtcgagaggcagcagtacacttcgtttaccgggtgtgcctccagccacggcagcgcctcgtccacgctacccaggcagggggtgttgtccggcagggtgtggtcgtcgtggttgctgaaatagccgagcacgcggtaacccgtgctggtgttgtcgaccatttcgtggtatacctccaccgcattgtccttgcttccgacgatgatcacgcggcgggcgttgcggccgtgtccgcgcgtgaccttgaccacgatgcggcaggtgtagcgccacagcatcagcagaatggtgagcacgatgtagaacgtccccatcaggtgcaccggcagcagcccgtagctccatacggtctggatgagcacgaagaaccccaggtggcagagtacgacgtagaatacgcggcggatgatctcctcgtaggggacgatccgcgaggagaggatcacgccgaaccacgagaggcccgggatgaagcagatgttgagacaggcgaatatctccagcgagcgggcgatacaggccggttgcggatacagcgtgagcgccagtatccaggacaggttcagtaagaataggtctccgatgatgacgggaagctttatgagcaaagactcccgcatgacttgtttcat

SEQ ID NO: 79 - DNA, 20072 bp, unidentified
  source 1..20072: mol_type = unassigned DNA
atgagtacccagcgctttgatatccgccacgcgcccgccccgcgggaatccttccgtctgctgtacatcagcaaaagcaaatttggcggcgattggaacagtaccacccacacccactcctgcacagagctgttctactgcctcagcggcgagggacagttctaccttgccgggcagctgttcccggtaaagccggacgatatggtcattgtgaacccgcaggtggagcataccgagcttagcctgaacgcctcgcccttggagtatatcgtgctgggcgttgccagcatggagtttttgttcagcaaggcggatacgaactacgccatcttcaattgccgggagaaccgggagcggatggtcacgttgctgcacatgctgctggccgaggccgaccgcagcttagacggctgcgagaccgtttgtcaggacctgctggaggtactgctgatctggctggtgcgctgcaccaccatttcgctgcagctggaggaggctgccccgaccgagaaccgggagtgcgccgagatcaagcggtatctggacaccaactaccgcgaggatatctcgctggacctgctggcagagcttgcccacctgaacaaatactatctggcccacaccttccagcgggagtacggaatttcccccattacttacctgaaccgccgccgcattgaggagagcaagcatatgttgggcaacaccggttacagtctggcgcagatcagcgagctgatgggcttttcctctcccagctatttctcccagtgcttccgcaaggcggagggcatgacccccaacgaataccgccgtcagacgcggcagggaaaacgccccgccccgacaaaacggcatgaagtataacgaaaacgaggaatttatgatgaaatccgttaccctttctctgctccagtctgctgcaaatgcctttgattttggcgggcctgtgctctgcgatgctcaccactatggtgaggggcatatcaacgacacctttgtggtctggcgggaagatcattccaaacgctttattttgcagcgcatcaacacagatacctttactaacccggtgggcctgatggagaatgtctgcggcgtgacccggcatctgcgggcgaaaattcttgccgagggcggcgacccagcacgggaaacgctgaatgtcatcccaactttgtcggggtcgacttgctatctggatgcagacggcggcgcatggcgtgcctacgactttgtagaagataccatctgtttgcagcaggtcggcagcgaaaccgacttccgcaccgtggccgagacactgggcaaattccagaaccagctggaggattacccggcctccaccctccacgaaaccatcgcccgcttccacgacacgcccaaccgctatgccaattttgaaaaagccctcgccgccgatgcactgggccgggcaaaaaatatcacgtcagaaatcgaatttatccatgcgagggagcaggactgccatgtcctgctggatcagctggcagctggcgaaattcctctgcgcgtcacccacaatgacaccaagatcaacaatgtcctcatcgatgctgctaccggaaaaggcatctgtgtcattgacctcgacaccgtgatgccgggactttcggcctacgacttcggcgattccatccgcaccggtgccaacgactgcgctgaggacgaacctgaccagagcaaagtccattttgacctgcatctgtacgaagtgttcgccaaagggtatctctccactgccggggcatccatgagcatggcagaaaaaaagagccttgcatggggtgcaaggctcatgacgctggaatgcggcatccgttttctgactgactatctggagggcgaccattatttccatattgctcgcccggatcacaacctcgaccgcgcccgcacccagttcacactggtgcggcagatggaagaggttttcgatcagatgctggaaatcgtctgcccggacaatcactgatttcgcaatctcctccattcggatacagcaagaagcatggacgctctccttttcgggggcgtccatgcttctttttacagcttatcgctatcgtctgtggcttttggcagggtgcgtccggggggacgcaccctgtttttttactatgcttcatcattttctgcgcgcagcatccggtatccgacaccaacatgggtctggatcagatgcggcgcatccgggtatcgttccaattttttgcgcagggatgccatgtaaactcgcaaggaagcaatgtcattttcctgcgtactgccccatactttctgcgtgagggaggtatgcgtcagcactttgcccacattatgcgccagcacacacagcagtttgtactcgatgggggtcaaatgcaattcattctcgctcagccagacgcagcctgccgagaagtcgatcttcaaaggaccattgacaaaaaccggactatttatgccgtcagaagccagcagattcaatcggcgctgcgttacacgcagtcttgccagcagctcatccacggaaaacggctttgtcagataatcgtctgcgccgttgtccagtgcctcgatcttatcagaatcttcgctccgggcactcaggacgatgatgggcaggttcgaccatgtgcggacgctgcggatgacctcgatgccgtctatatcgggcagcccaagatccagcagcataatgtccggattgtggctggtagtcatcatgatcgccgtttccccattggaagcagtcagatatttatagccgtgggttttcagggtcgttgtgatcagacaccgtacaggaacatcatcctctacgaccagaatggacggcttattcatgaatgttcacctcgctttgcggcaatgcaaaggaaaagacactgccattgggaatgttgtcacgcagggtcaatgttccgccgtgagccgtcaagatcgcacggcagaggggcaagcccagtccaaggctgcggtggctgtctgcaatgcggctctgcccggtataaaacatctcgaacacctgtgcttttgcgcgatccggaatgccgggaccgttatctgcaacgtccactacgacctgatgttctttccggtaagccgaaatctgaataaccgagcctacgggggtgtatttgatggcgttatccaccagattgacaacgacctgcatgatcagccgtgcatccacattgaccaagaggatctcgtccccatactgtgttgtgatggtatgttcgcagcttttccggttgacatgatgcagagcttcttcgatcatttcgtccatcagctgcggcgagatctgcagattcatccgcccatcctcaatgcgggtgatggaaagcagattttccaccagaccgatcagccattgcgcatcgtcaaaaatatcggtgcagatcttgttccgggtctctgtatccagcgtttctccgttggaaagcagattgctggcattgccggaaatggaggtcagcggggtgcgcaggtcatgggagatcgtgcgcagcaggtttgcccgcagctcttcattccttgcctgcaatgcagcttgctctttttccagcgcgtttctgcggttttcgatggccagcgcaccttcacccagaatggaaagcagcacgctgttttcaaaggcatccagcggtttttcggacagatcgattccgatcactccaaacacgccgcctccggtccgaagcgcaagataaagcccctttgcatccgggtagctatccgtgcctgcgccggaacgctttttgttggcaaacgtccagtttgctgcatcccgttcttccggtgcagaaaagatgttgcgcggcacttccccatcaatctcaaaaacctgttctgacccaagatctccgttttgttccgggtaaacgatcaagctccggttcagcagcttcatcaactgggacgctgtctgagagaggatttcttcctcgctttttgctctctgtaaaagctgatttgtatcaaacagtatttttgtacggaacgctgcctgcgcagacatttttgcatgatccttctgccgcgttgtcagggcgcaggtaatgattgcagaggtcagcatcagggcaaatgtaacctgataaccgggatcatacgcatggaatgtcaggtatggctcggtcatgaagaaattgtacaatgctacactggcaacggaccccagcacaccgcaggtgtagccgctggtagacaatgcggtgaacagcacccccagcatatagagcataataatattatagcgcgcaaagtccagttgcaagaaaaagaagccgatgagcgtgatgcagctcaggatgcctgcggtgatcagcagatcacggacagacggcagaagcgaacgggtgaacagcttttttcctgagccgtagccgttctctgcagaagcatccgggatgatataaatatccagattaggcgcagtcagcgtcaatttttcagtcagtgacggtccactccagaaatggcggcgatgtacgctggagcgccccagtacgatttttgtaatgccggagatgcgggcaaactctgcgatctgctgcggaatgtcatccccgtagatcgtagaaatgtcggcacctgcctgctctgccatacgaatgtgctgctgcaagcgccgacagtcttcttttcccatctgatccgagtcaggcgtccggacatacagagctgtaaaggtccctccaaacgcctttgccatcgttgctgccgtccgcacgatctttgcattggagggagaggacgacagacacgccagaatatgttcagtgggtgggtcgttctgattcataaagatcacctgccttgcccacagtatagcacaatttgatggttacgaccaccagccacgtctttttccttcctgtcgaaggatctcctgtcgtatgtgatccagcgcatctgctgcccggaaaccactcaacatgactccaagaaccatcaataacaaagcgacatccatacgatccgtcctatctttttagagccggaaacacttctggatcgatgcgtatttccccaaaaccagcatactttcatcccggcacagctgcgtatccggcgtaatgctcatatcgagctttccgtcttttttcagtgcaagaatgttgatgttatacttttttcgaatattgatctcgccgatcgtgcgattcatccattccggcggaatagtcacttccatgatggcgtggtcgtcctgcagctcgatataatcgagaatgtgttcggagctgtatcggatcgctgcccactttgccagctgcttttccgggtagaccacttcatccgcaccgttgcgcagcagaaacttggcttgtacatcccgctctgcacgcgagaccacaagctttgcgcccagctccttgagcagtgatgttgtttccaacgaactctgaaaattgccgccgatggttacgatacacacatcaaaattgccaacgccaagggaacgcagaaagtattcgctggtgctgtcaccgatctgtgcattcgtcacataggaaagcacagcgttcacacgatcctcattgctgtcgatcgccatgacctgatgacccagctcattcagttcctgcgcaatatggcggccaaaacggccaagcccaatcaaaagaatcgatttcatacttgtctcctttatccgattgcgattttctcctgcggcagacgagagtgggcagggctgctgccaaatgccgcgtagatcaacgtcaatccgccaacacgtcctaaaaacatcagtgcaatcagcaccccctgcgaaaggatgcccaactgcggcgtgatgcccaatgtcagacctaccgttgccacagccgaagcggtctcatacagacagaccgacatcggcagctgctctgccgtagcaatgacaaaggctccgaggaagaacagcgtcaaatacatccctgcaatcgtggcagcattcttgaccgcagaactatctatgcgccgcccgaaaaattccgcatcttctctgcggcggaaggtcgcccacatattggccagcagaacggcaaatgttgtggttttcatgccgcctgccgtggagccgggcgaaccgcccaacagcatcagaaccaccatcaatgcctgtgacgtgctgcccatcgcagcaagatcggcggtgttaaaaccggcagtacggggtgtgacggattggaacatcgacaataaaatgcgctgccgggcagagcctgccgtgaactcgaagcaataaaagtacagcgtcggcagtaccagaagaaacgccgttgtgacaaggatcaccttgctctgcatccgatagcggtgaaagtcaaggcggtatgtacaaatgtcctcccatgtcagaaagccaaggccgccaaagacgatcagggccgcgatcactgtggtaagcaatgggtttcctgcataccgtgtcagcgaaacaaattttgcatcctctgttcccagcaggtcaaagccggcattgcagaacgccgaaatggaatgaaacagtgcataccagatcccgcgcaaaccataatcggcgcaaaatgtcggcagcagcagtgcagcaccagccaattcaaacagagcggtgatccgcagaataaagcctgtcagccgcacgatgccgcccatctgcggggcagccgtagcttcctgcatcgtgctgcgctgcttgagggagatctttcgcccggaaagcagcgcaaaggcagcacccactgtaatgacgcccagtcctccgatctggatcagaagaaggatcacactctgcccgaatgccgaccagtagctgccggtatcctgtaccaccagtccggtcacacaaagggcagaggtagaagtaaacagcgcctcatggaacggtgtaacgcaccgctgctgtgcagcaatcggaagcatcagaagcaacgcgccaaccagatcaactgccgcaaaccctgcaataatgacctgaaaagaagaaaaacggtgctgcctgtaacgaggatattgaatcataaaagctcctttacctatccgtgtgcataaagattagcatggaatagataaaagagtcgtaaagaaaattgtagaagtataaagattccattaaaattgatcgggcaacaccaaataacaaatgctggacatcaccagttaaaaaaaacagtaatatccagcattcattcagatttctaacccatggctcccggccgcattcttcaaatattcttccggctcgctatccagaatcaaattcgcgtagcccagcggatcattgtagatgaggtagtctaactccgacctctgcgccatggtcacgtccagtgcatcctcgaccccggtgcagtcgatggaaatttttctcccatcccggagcagcagctccacgcagccggtgtccatgttgaaatgacaaactcttgcatcgtagcctagaattcttcccgcatggaagaaccctagggctatcttttttgttataaaagtgtttggaacaaacgcgccgcctgcatcggcacgatgcagaacaaatggggtttgggcacagcccaacaagcattttgcaaagcaaaatagcatttgtatagacgaatgccctgcttgctacaaccgcataccgcttatctcgctggaacacctcttgattttaacacaatcggatgttatcctattcttatagaaatctccgaagggcaggtgttttcatgtacaatcatcagctggaaaccttcatccgtgtggcggatgcaggcagcttcaacaaggcggcagaggaaagctacatcacgccaacagccatcatcaagcagatcaacctattggaagattcccttggtgtcaagctgttcgagcgtactcgccggggactaacactgaccaaagcaggccgttccatgtatcaggatgccaagtacatcattcaatactgccatgattctgtcattcgtgcccggaacgcaatgcaggaggattccaacgtcatccgcattggttcctctcccatgacacctgcccagctgctcatggaactgtggtcgaaagtgcagaccatctgcccggacatcaaattccagattgtgccttttgaaaacaccccggaaaatgcacgggaaattctggcggacctcggcacgaacattgatgtagtaggcggcatctttgatgaaacgatgctgcatctgcgcaaatgtgccggtctggaactggttcgcaggccgttttactgcgcggtttccatccatcataaacttgcggcaaaagaccgcttgcagatcacagacctgtacggcgaaaatctactgctgatgcaccgtggatggagccactatgtagatgaactgcgggatgatttatggcagcaccatccacaagtaaatatcgtggattttgaattttacagcatggacatcttcaaccgctgcgaaaacaccaacgatgtgctgctggcaattccgggctgggccaatgtccacccattgctgaaagtgattccagtagattgggattacggcatcccctatggtatcctgcactccccgaatccaacgcctgccgttcagcgttttctggatgcggctaaaatagccagcaaggaattgtatcgctgatacgccactgcaacgagaagctgctgcatgagaaatcatgcagtggctttttctttttacaaaagatgcacttgacctaaagctgactctaagtgttacaatcagggtgtcaagcgggttgtttgaacctttgagttcaaacaagtgaacaaaatggagattccgggaaatgcagacttgcgctatactggaaccagaaaaagagagtacctcaaaggaggaacgaccaatgaagaaagtcttgattttgtccggcagtccccgcaaggacggcaactccgacctgctgtgcagtgagtttatgcgcggtgcgcaggagagcggcaacgaagtgcaaaagatcttcgtgcgcagcaagaagattgtgccctgcaatgcctgctattactgccgcgaccacggcggcaagtgtgccctgaacgatgacatgagcgaaattctggacgcaatgcaggcggcagatgttatcgtgatggcaagcccggtgtacttctactccattgatgcacagatgaagatcatcatcgaccgcagccttgcccggtggacgaacattccgaacaaggagttctatttcatcatgacctgcgcggacgataaccgtgctgccatggcctgcaccttggagtgtttccggggctttaccgcctgcctgaatggtgccaaggaaaagggggtcatctacggcaccggcgtatatcggcccggcgaggtgatgtcctccccggccatgaaggaagcctacgagatgggcaaaaacgtctgatttcccagttttatataaaggagtgtaacggctatgaacaattttctgtttgaaaacaagaccaaggtttatttcggcaagggtggcgtgaaggaatatctgggctgtctgctggagcactacggcgataccgtgatgctggcctacggcggcggttctatcaagcacaatggtgtctatgatgaaatcgtcggtattctgaacgccgagggtaagcgcatcgtggagtttcccggcatcatgcccaatcccacctacgccaaggtgcaggagggtgcaaagctggcccgtgagaaccatgtggatttgatccttgccgtgggcggcggttccgtgtccgactgctgcaaggtggtgtctgcacaggccaaggtagacgaagatttgtgggagctggaaaacaccaagcatactcgtcccactgcgttcatcccgctgggcaccatcgtcacggtgttcggtaccggctccgagatgaacaacggcgcagtcatcacccatgaggaaaagaagattaagggggccctgtggggtgcacaggccgactttgctttcctcgaccccacctacacgttgtccgttcccatgaagcaggtcatttccggtgcgttcgacaccctgagccacgcgatggaaacttacttcggcaagccggacgagaacaacctctccgatgacatcaacgaagccgtcatgcgcagcgtcatccgcaacatccgcgtcctgttgaccgacaaggacaactacgaggcccgcagcgagctgacatgggcttcggctatggccgaaaacggcatcctgaaaatcggcaaggtcaccgacttccagtgtcacatgatcgagcatcagctgggtgcctacaccaactgcaaccacggtgctggtctggcggtcattcacccggtgctgtaccgtcacctgctcccggccaacaccgcacggttcgcccgctttgcacagaacgtctggggcatcgacccggcgggcaaatccgagctgaaactggcacaggctggcgtggaggctctggcggccttcatcaaggagatcgggatgcccaccacctttgcagaactgggcgtccctgccgacaccgacctcaaggctgtggccgattccaccgtgctgaccggcggctgctgcaagaagctgagccgcgaagaactgctggacatcctcaacgagtgcaagtaatcaaggaacgaaaaatacaaaaggagctatttattatggaattcattactctgaacaatggcgtcaagatgccggcagagggcatcggcaccttcctgctgaccccggacaaagctgaaactgccgtgctgagtgcgctgaaagacggtgcacggcttatcgacaccgccaacgcctactgcaacgaaaaagccgtgggccgcgctatgaagaagtccggtctgctgcgggaggaaattttcctcgaaaccaagctgtggccgaccttctacaccgatgccgatgctgtggacaagacgctggcacgtctggacaccgactacatcgacctgctgctcattcaccagcctgccggtgattacgttgccggttatcgcctgatggaaaaggcttacaaggagggcaaagtccgtgccatcggtctgtccaacttcaacgaggagcagatcaaagaaattctgagcatctgcgaagtcaagcccaccatcctccagaccgaagttcacccctacgcccagcagaaagaactgaaagccttcctcgccgagaatggcatggtgattcaggcatggtatccgctgggccacgctgacaagggcctgctggaagagccgttgttcacacgccttgcagcaaagtacggcaagagcaacgtgcaaattattctgcgctggcacattcaggcaggcaatgtggtcattcccggctccaagaacccggcccacatccacgacaacttcgatgtgttcgattttgcgctgaccgatgcagaaatgcaggagatcaccacgctgaacaaggataaacggtattatgaggtcacggaggataagctggcggcattcgccaccatgtttcctcccgtggaagatcagaagtaaatttcaagcagtttgtagctgggtgcggagagtttttttgcggaaaatgaaccagatgaaagggtaaatgaagatgaataagatcacgcgcaaaagttttctgaaagttcttgccgccaccatggtgggtggtgcagccgcttccgcgctgacgggtgcagcggctcctgtttccattgacgagacaaacggcaaggtaagccgctgggtaaagaacaacctgaacccggacggcccgctgacgattgccaagcaaggaatgttctcctccggcggcacggtcacggcaccggtggcaggcacttatgatgccaccaccaactggctggacactacccgtgcaggcaacaccgctcatgtggatcacgctaatgttctgtatcaaatcccggcagacagcaacggttggccgatggtttatctgcacggctatggacagtcccgcatgggctggataaccaccccggacggccgtcagggctgggccgatctgtttctgcgcaacggctactctgcgttcttggtagaccagccccgccgtggtgaggctggcagtaccgcccagatgagcacggacggtttcctcgatacttggtctgccaactccaaggactacaagcccggcgatcaggcatggtacacccacttccgcattggccgcgttgccccggaacggtacgaaggctcccagttcccggagggcgatgctgcacagaatcagttcttccgccagatgacccccaacaccggcgacttcgatcaggcagttgctgccgccgcactgggcgaggtgatgaaggacgtgcagaccctgaccggccacaagtccattttcgtcacccactcgcagggcggtgcagtcggctgggatgtgcccgccgacaacattgccgccattgttgccattgagccgggcggaacccctgccatcggctcggagcagtacacgaaactgctgagcgcaggtattccaatcgctatctactttggcgattacatcgacaacggcccggaagatatcatgtccaccagcttctggcggcgggtacgggacggcgcactggcctttgccgcccagtacaatgccgatggcggtgactgcactgtggtcgatctgccgaaaatcggcatcaccggcaactcccacttcatgttccaagagctgaacaacaaagagatcgctgattacatttatcagtggctggagagccgcgcactggcatgagcggttctctgagattcccggcattttacatagatagaggcgtgtttcgtatgaagaataaaatttcccgccgccagtttttgcaggttgctggcgcatctgctgccgccctgctgctggcttcctgctccggcaattccgctagcagtgtgagcagttcttctgtggcttccagtgaagccgcatccagcgcggctgcttcttcggaagctaccagcacggtaacgactacgggcaaaacactggtggtgtatttctccgccaccggcactacacagggcgtagcgcagaccatcgccgacaccgtgggtgctgacctgtttgaagtcgttccgtctgacccctatacctccgatgatctgaactggacgaacaatgacagccgcgtttcccgtgaacacaacgacgagggccttcgtgctgtggctttggaaagcaccgatgtggacggctgggacgattacgacaccgtgttcatcggctaccccatctggtggggcattgccgcatggcccatgagcagctttgttgccgtcaatgacttcaccggcaaaaatgttgttccgttctgcacgtccctttcctccggcatcgggcagagcggcaagctgctggcagaattagcggacgccggcacttggctggacggccagcggttcagccacagcagcagtgaagccgacattgcaagctgggtaaatggcctgaacctgtaagcagagcttttgtgtgaggagaattttctcttgcggtaatttttgaaatagagggtaaatcaaaaggagaatgtttgtatgaaagcattgctcatcaacggcagtccgcggcccaacggctgcacctttacggccctgaccgaactggcaaatacgctggaagccgagggcattgaaaccgagatcgtccatgtgggcaacaaggacatccggggctgcatcgcctgccgccgctgccacagcaccggctccaacaagtgcgtctttgatgatattgtcaacgaagtagcccccaagttggctgaagccgatgcctttgtcattggcgcaccggtgtactttggttccccggcaggcggcgcgatctcctttatggaccgcctgttcttcagtaccctgaacatcgacaagaccatgaaagtgggtgcttcggtcgtgacctgtcggcgcggcggcaacacagcttcctacgatgtgctgaacaaatattttaccatgtgtgggatgccagtggccagcagccagtattggaacatggtctacggcggctctgccgaggaggtcaagaaagatgccgagggcttgcagaccatgcgcacccttggccgcaacatggcctttttgatgaagagtatccagataggcaagcaacagatcggcctgcccgaaaaagaacctgctgtcttcacaaacttccatcattgaggaagtgttccatattcctccttctttgttgcagggaaagccgggacggaaacgtcccggctttcccattttcctgatttttgcgaggtgattttatgcgcagcgtgattttcgcggtttccaccgctttgaccgttttattatccgcctgcaccggggcggcatcctctgtgccagtcaatacggtttcttcggtttcggccagcacatccatcacgacctcgtccgaagtggattcggctgtttcggagagtgcttcttcggaaaccggaaacatccagactgggcttgtccgggagcagacattggacagcactgaggagctcatccattacagctactacctgccggaggattacgaccccacccggaagtaccccatgatggtggtcatgcccggctataacatgatgtggttcggggaatcttcctccggcagcaatctggactggacggggtttaccagctggacgaaccttggacaggatatgatcgtagtgtctgcccagctcaccgactggggcgacacttcggcgcggcaggccatcgctctgacggagtatttcatcaatcactttgccgtagataccgcccgcatttacgccgcaggctactcggctggcggcgaaaccatgtcgcgggcagttgccatgcggcctgacctgtatgcagcttatctgcatggagcatcccagtgggacggcggttttgcgcccattgcagaaaacggcgtggcggtctacatctacatggcgcagggcgatgaatactacggtgtgcagaaagcacgggatgcctacaacggtctgcacgatgcttacgccgccgcaggctggacggatgaacaaatcgacaccgtgctgcaaatgcagaccccggacaacgcctttttcgatgcgcaggggcttcacgtctaccatgctgccgcaaatgttgtctttgatgatgccgatattctgaactggatcgtttccaaacacaagtgataggagagaaattttgaaccgacggcaattcacaaaacttctggcgggtgtagggctgcttctggcaggctgccgggcaggtgctgcacccagttcctccaccccggaaagaaaggattccatgcaaacgaccacccaaacttatacccgcaccacgcccatcgaaaccgtacggaatgacccggttttcggtgattatgggcggctgatcttcccagtggaacgctcttattacagcggcgacacgctggagcagctgcatcttacctactataacaacatcgacccggacgaaacagtggacatctgcaacaccctgcgccagcgtgcagcggacgggcagaccatcttttacgatatttacaccgaggacgaacaagccgctgacccggacaaagctgacaccggcttattctacttcaagggtaatcccggcgcaaaattttccatctgcaacgcaggcggtgcgtttgcgtatgtgggggccatgcaggacagctttcctcatgcactggaactttcccgcaaggagtacaacgcttttgcgctcatctaccgccccggcgcacagaccgcctgcaaagatctggcacgggccattgcctttgtctttacccatgcggaggaactggaagtagacaccagcggctactccctctggggcggttctgccggggcacggatggcggcgtggctgggcagctacggcacggcatccttcggtgaacaggcgtatccgcagccgggagccgtcatcatgcagtacaccgggctgggggaagtctacggcaacgagccgcccacttatgcctgtgtgggtgaccgggactacatcgcagacgaacgcgtgatgcgctggcgcattgaaaccatccgctctcagggcacccctgccgagatcgaagtttttccgggccttgcccacggttttggcttgggcaccggcacctctgccgaaggctggctcgatcatgccgtagcgttctgggaagaaaacatctgaaaccgtgaggaaactgttatgacgaaaaaatggactgcactgcttctcgcggcagtacttgctgtcggtctttcggcctgcgacaccagccgcgcagaagcccccagcagcaatttggaaagcggagtttccgccatcgaggatgctatgacgaaacgaaatgaaaccgaaagcagctcgttcccggcaggcagcgacctgcgcatcggcacttctgccgacaccgttgcaacgccgaatgatttcccggcagcatacaactacggcactggaaaaattgaggattattcccgtaccgccatgctgcaaaagatgccggaaccagtggacaatgcgaccgtgctgaacacctcggcagaccctaaccatattcaggcgttgtacctgtgggaagaaggcaacgttccggctaaaacgcagttcaccgctgcaatgaccggttattttgacaactgggatttccgcccctatgtgacggcaattcccgtccgcaccggagtacaaccgaaaggtgctgtggtgttgatggcaggcggtgcgtatcagttccgtggaaactataccgattctctgcccacggcagcggctctacgggagctgggcttccagaccttcatcgtagattaccgtctgtcgccctacacgcaggaggaaggcgcgctggatgtagcgcgggctgtccgctttgtgcggcagaatgcggatgtttacggcattgaccctgacgatattgcagttatgggcttttccgcaggcggcattcaggcgggcgaatttctgatgcactacgatgaagatgtcaacggcactgctctggatgaaagctatgtacccgatgcgctggatgctgttccggctcacgcttcggcggcgggcatgatctattcgttctatgggcggctcagcgtgggcaacatggacccggactggctggccgagggtgatctgccgccaacattctacgtttacggcacggaggaccccttctaccgccaattccagcagcagtatgatgtgattcggaatatgggcatttccgccggacgcatcgtgctgaatagctggccccacggctttggctcggatggcggctgggtgaacgattacgccgcatggctggaaagtgtttttgcaaataaggaggaatcttaacatggaatatcgtactttgggcaatgacctgaccgtttcggctgtgggtctgggctgtatgggcatgagccatgcctacggcgcacctgccaacaagaaggaaatgaccgaactgctggcgcaggccgtgggtatgggctatacgttctttgacaccgccgaagtctacggcacaccggataatccccacgacaacgaggaactggtgggtgctgccctgaagccctaccgagataaaatcgttctggcgaccaagttcggcatccattttgacatgaccagtacggcagtcaacaagccgctggtgccggattcccgcccggaagttatccgtgcatcggtagatgcctccctcaagcggctgggcactgaccatattgacctgtattatcagcatcggcttgaccccaaggtacccattggggaagtggccggtgtaatggctgacctgattcgggagggcaagatcactcactggggcctttcggaagccaccgaggagaccatccgccgagcacacgcagtctgcccggtaacggccatccagaaccgttactccatgatggcccgctggtacgaaagcctgttcccggttctggaagaactgcacattggttatgtggcattctcgccgctggcaaacggttttctctccggcaaatacgataagacttccaagtttgaagcaggcacggactaccgcagcgtcatgccgcagttccagccagacagcattgaccagaaccacgccctgctggaactgttacaccgtcttgccgccgagaaaaatgcgccacctgcccagatctcactggcgtggatgctgtgcaaaaagccttatatcgtaccaatccccggcacccggaaactcaaccgtttacaggaaaacgccggtgcagcggatattgtgctgtctgccgtagaagtggctctgattgacgaagcactggcgcacatggaaatgtcgcatgtgtttggcgggagccgcattgagaaagagtaagacagcagctttgacgatgagcttcaatagatcatgcggaggtaattgtttttgatatgtgcggcttttcaacgagggtgatcctatcaatttctatgccgtcttatgtcttactccgcaagagttgtatgacacgctggaaaatgatctcgcggttgaaaaagaggtgcagaatccgcaaagagattgatttcggctaaattattgtgtaattcatttgcttttcatttgtttttatggagcagtctgatacaatattgcgtattcagacaaaagaacgccagaaaggtccgtaacgtcctcgctggcggttcaggtgtttttgttctgctccgaaaattctgtcaaatggattgcaagcgatcttgttgcttccagcagtgttttccgcatttctggtggacaagcaagatagattgcatcccattctcggcactcactttccaattctgacagatttggattgatgattgaatccaaggaaaggggtaggacatggaggattgcactcaaaatgtcaaaagaaggattttgctttccgttttcaatattggcgatatacttcaccgaaacatggctttttagtgccagctgatcttgtgtcattcccattgcttttcggacagcctttatctgctttcctaaagcaatcgcatccgcattcggcatcatcatcacctcaatagtattgtatcgttcttgcggaaagaacggtataacatcatcattccagtgattttgtcctatcgtgccgatgtgttatattgcgccagcttcccgccatgggaggctggcgtttttgcgcttttggagccaaagtgccgcagtccaccgtttctcctatgatacagcagcaaactttatatttgggagggaaagtcatgctcgatcataagaaggaagcgattacggaacactggcagttttgccccaagtgcaatataaagctctatcgaatgaccgccgactgcactggattcatccatataaaatgctggcgttgccgggaaatgttatggctcaacctttccattcgggccaagtaagcattgatttcataaaaatcgggtgcaacgcactctgaatatggactgttcgcaccgagcaacgggccgtcacctccgggtgatgtatgaaacgtagcaccaaatggccgggcagcagcttgactgaaagctctccaatctttcggtcggctgttgtccggctatttttatagcttcagatcgcctgcttccgaaaaggagcaggttttatgtttgccctcttttcatggctgccccagatggcgaaatatccgtagtgtttccaaattttcggcatttcacgttttatcgaaaatttggaggttacacatgggctttaattatggtttggaaaagaagaactttgaccgtcagtgggctatcatgcgcaagcagtatgaggacgctggcatgagcattgaagtgattcaggcaatgtatgagtatgactggtctgttttcaatgctgcgcgttcttaccagaaccacacgcaggagatcaccgctccgtcctttgaacagggcgaagaatcctactcgccccttatgaacaagtatcaggaagcaatttctgttaccgaacactaccgcgaaaccaagagccgcttcacatggattggcgaaattgagaacgaacggctgttgtctgctcttgaaaatttgtcggacgcagacctcaaccttgtcaccatgtatgcctatgaggggtacaccgtcactgaaatttctaaagttttaggtgtcgcgcagcctactattagtatcaaaatcaagagaatcactaaatttttgaaaaacttcaatttcaatgctatggattga

SEQ ID NO: 80 - DNA, 9738 bp, unidentified
  source 1..9738: mol_type = unassigned DNA
atgaaaaatattctgatgaacgaaaacaatatcgggatcataaaattatatgagaaaaaggagatttcaattatgtgtggaattattggatttacaggtaaattaaaagcccaggatgtcttattgacaggacttgcaagccttgagtaccgtggatatgacagtgcgggaattgcgtactttaaagataccggaaaaatttcacttcggaaaactgtcggaaaagtaaaagatcttcgtgcaatctgcgatgatgataacaattctacgtgtggaatcggccacacccgctgggcaacccatggtggcgttaccaatgccaatgcacaccctcataaggtcggacaggttgcattgatccacaatggtatcatcgagaactatcatgatctcgccaccaaatatgatctgacggatgaactgatttccgagacggataccgaagttgccgccgcattgatcaataaactctacgaaggagatccaaaagaagctcttcgcaaagcagtagccgaaattgaaggttcctttgccttctgcgttctgttcaaggatcatccgggtgaaatttatgcggtaagaaatgtcagccctatggttgcaacatactgtgatgacggtgcttttattgcatctgacctgactgcttttatcgcatacaacaagcgttatttcatcgtgccggaatatcatattttaactatgactgcggacggcattacgttagaggatttagacggtcattccgtagaaccggaatatatggaagtaaactgggatgttaccgcagcccagaaagatggctatccgcatttcatgatcaaagaaattcatgaacagccggctgccatcacaagaaccattaccccacgtatcaaagatatgctcccggatttttcggaagatgccattgcggattccttctttgaaaatgtaagcgacattacaatcgttgcctgtggtactgcaatgtacgcgggaatggtaggaaaaaccatgatccagaaccgcctgcatattccggttaccgtggcaatcgcatcggagttccgctatgaagaaccggtaatcaatgaaaaatccatggtgatcgttgtatcccagtccggagaaaccattgatactttggaagctcttcgccttgcaaataaatatacaaagaaaacactgtctattgtaaatgtaaaaggctccagcattgcacgtgaaagcagctatgtattatatacacatgccggtccggaaatcgctgttgcaagtacaaaagcatacaccgttcaggttgcttctttttacctgcttgcatgcaaacttgccatgaaacagcaaaagatttctgtcgaagaagcacgtacatttattggaacactgcaggaaattccaaattacatcgaggaagttcttgcacaggctcctgatattgaacagctgaccaaacgcatgatcaatgccaacaacgcgttctttatcggtcgtggactcgattataccctttgtatggaaggtgctttgaaattaaaggaaatttcttatattcatgccgaagcctatgctgccggtgaattaaaacacggaaccattgccctggtcagtgaaggggttcctgtcattgccgctgctacccagaaacatgtatacagcaaagttatttccaatatccgggaagtaaaagcccgtggtgcttatgtcattcttttgtccaaagacaaagaaatcacagatccttctatctgtgatgtacacatcaatcttccggatgtatccgacgaatttacgatttttgaatctgttgtaattttccagctgattgcatattacacatccgttggaaaaggcttaaatccggatcagccacgtaacctggcaaaatctgtaacggtagaataagaaaaaactgtcgcgcgaaaattcgtgcgacagtttttttgacatagagcctttctaaaacttttgaaggcaaaaaaagaaccccagaagctctctaaaagcctctgaggttgcccctgccaaggattctctcacccatgtaccggaatccttgtatcgtcggcgcgacaggatttgaacctgcgacctctgcgtcccgaacgcagcgctctaccaagctgagccacgcgccgtttcaactgcccaattatagtaacacattctccggtgtttgtctagtgaatttttttaatttatggtacaatacaaaaaaagaatggagaagaacaatgaaacatactgctttgattacaggtgcatcccgtggaatcggtgcagccctggcatgtcgatttgccgctgaaggctatcatctggctctttgctgccataactcttatgaaacgctgcaggcacttgccacaaaacttgaaacaacctgctccatacaggtgcttggcttccgtggtgatgtaggagactatacttttatctgtgacatggtgcaaaaaacactggataccttcggccagattgatgtgttaatcaacaatgccggcatctcttatatcggtctgctcaccgacatggatattaccgactggaaccggattgttgcgacaaacctcacatccgtcttttccacctgcagacaggtcatcccctccatggttcatgccaaatccggacatatcatcaatatttcttctgtatggggaaatgtcggagcttcctgcgaagttgcctattctgcatgcaaaggtggagttaattcccttacacgcgctttgggcaaagaacttgcccctagcaatatccaggtaaatgccatcgcctgtggggtaatcgatacggatatgaaccgttgtttctccgaggaagaacgctctgcactcatcgaagaaattcctgccggtcgtatgggatccccggaagaagttgcttcactggcatattctcttgccacagcaagcagttacctgaatggacagattctcaccttagacggcggatggatttaatttcttatctttttggaaatctttttccatttatttaagaattaaaacgcaatacgcgttttctctgttttttatatcaactttctataaaatcatttgtatgaaaacgaatgataaaaataaatacaaagattttggtgaccgtctgagtctgattatgtataaacaaaatatttccaatatccagctggcaaatgcaatgtttgtttcgccgtccacgatcagcggataccgtaccggtcgtcgttctccgaccgttgcggatcttgcagccatcgtgcagattctgaatgtttctgcagattacctcatcggaaccagtgaaattacaaccagacccgataccaccgaaaaaaatagttgagcacgccctgtttccagagcggtgcccaactcttttttataaatcatgttctgccagtaaaattaccgtagaacgttccggaacacgcacacgtgtctgatctccctgtgtctgggcttcaaaatctgccccatcctggtattcacagaaagtatttactacaagtttccaatgataagactccggcaacgaaggcaggcgcatctccaaaggctcccaatacgcattcattccgtaaaagatcatatcatcatccgtatcatcggcatttcttcccgcatacatgattccaattaaatgtgtattatagtccgtataattccggttcggctctccgttatggatacttacggaaggtaacccgcagactgccggctttgtatcccttcgcagaatcggatgctttgcacggaaatggatcataaaacgggcaaaatcatgaatctcctgaaattcttccagtctgttccagtccagccaggaaataatattatcctggcagtatgcgttgttatttccatactgcgtattacaaaattcatcccctgcaaaaaacatagccggtccacggctgcataacaacgcggcaaatgcattcttcacgagtctgcgccgcaggcccataaccaccggatcatccgtctcaccttccaccccgcagttccagctcaggccgttgttatccccgtccgtattgttccatccgtttttctcattatgcttttcattatatgaatacagatcatacaacgtgaacccatcatgacaggtcagaaaattgacggatgcactatatccgcggcttgccggatcatacatgtcggaggatccggtgatacgtgtaattgcacgccctgcgacgccactgtcgccctttaaaaagcttctcatatcatcacggtatcttccgttccattcggcccagcggttccaggacggaaaacttccaacctgatacaagccacccgcatcccaggcttctgcgatcagcttcatatcccccagaatagagtcaaatgcaagggcttccagaatcggcggattctccatcggtgcaccattctgatctcttcccagaatcgatgccagatcaaaccggaatccatccacccggtactctactgcccagtgccgcagacagtctgtgataaaccgccgtaccaccggatgattgcagtttaagacattgccacagccgctgaaattgtaataatatccatccggtgtaagcatataataaatattgttatcaatccccttaaagcaaaaacatggaccgttttcatttccctctgccgtatggttgaataccacatcaagaatgacttcaattccattttctttcagttcgcggatcagacgctttaattcatcaccctcatgattatgctcctgatgaaatgcataacttgtattcggggcaaaaaaggaaaccgtattatagccccagtaattgtacaactgcacgccatccaccacacgggcactttccatttcatcaaattcaaaaatcggcatgagttctaccgcattgattcccagatctttcaaatacggaattttctgtcgcagaccttcaaatgttcccccaccttttacaccggaggacgcatctttggtaaatcccctgacatgcatctcatagatcaccagatcttcaaatttgtaattcagattccgataccgcccccagtcaaaatcactttgcaccacacgggctttatagacaaaatcctttccgccttccggtttttctccccagtttctctgaccggtaacagctttcgcatatggatcaagaagcgtatgttttctgttaaacagtaaccctctcgcctgatcggcaggaccgtccatctgataggcatactcaaaatcctctgcttttaagccaaaaacaaggatagaatacgtatttccaattttataactttccggaatgcggattcttgcatacggttcctgtgccgccggccggaataacagcaggacacagctcgtagctccatgggagcttacggtaaaacttaccccttcctctgtctgatatgcaccattcatctgataaaatcccggacgtacatcaaatccaccgatattatcgagtggatgaatgacttccccgagactttccatttcttcgtctatcggccagcttttctgttttgacggataattccaaaaacttgcattcatgtgctgattcctcttatcattattatttacttgccacataaaattatattatccccctactcttccctgatgattaccctgccatttgcgtcaaatccgattttactgtacttttccgaatactcattcatatgatcaataatcgtctgttttctgtcgccttttgctatggcaggctgaaaattatttctttctgatgtggaagaaatgctgcatggtatcatatcggctgatatatctgtctgcagtaccccatccacaaaggtaaaggtctgttcatagatcgccgtatctttgtcttttggattcctgttccccccaaagcagaaatttccaagactgtagcagatcatttttccgttgtataattccattccctgcaatacatgaggatgtgtaccgaccagcagatctgctccccagtcaatcacctggtgtgccagcttctgctgataatcattcggataatgatccccctctatcccccagtggcaacaggcaattaccagatccgctccttcttcccgaagttctgcaatcccatcccggatataattggcatgtttttcatctgcagacaactggcttgcggagacaattccgattttgataccatccttcgtggtataggtatccacatgatcattgaatccgaagataatccctgctttatttaacacttctctggtatcatcaagtccctgctgcccataatcaaacgtatgattatttcccagacttgccccctccacagaactgtctgtcataataccaacatactccggttttccttttaagttccacgttttttccacacgctcggtcgcatttgacaacacacattccagattgaccagtgtaaaatcatcctgctcaaaaatacttctgacatttttaaaaaaataatcctgcccgtatttatcatagtattcatgaaaggaacctgcatacccatgcgtctgtgttgccccaagcgtacagtcacctgtcgccgtaatttttaccgtctgtatcaccggttcctgctgcgtttcagttgcagtcccggtttccgtttcttccagcgtacccggttcttccgtcatctgtgtctccgtgattttttccgcagaagagggcaaagccgatgacgttgctgcaggagaagaacatcccgtcagcaaaaatcctgccattaggattggcaatatccattttttcatacgttttcagactcctctttcacaagaatatccaccgtgtgaccgcttgcacccataagatccatccgttcacaggttgccagatgatactgtaaaaatgcatcaaactcttcttccgtcagcgcatttaaaaacggacgcatataatttgctgcaccgtctgccgctatgatctgccggcgcctgacctctacctgccggtccaatgcttcaatatcttccagacgaaccatggaatacagaggattggcttttgaagtacagtgataatcctctgtgagcattccctccttaagcgcctccagaatatgtttttccttaaacgcatacgtgataacggaaaattcattcataatatacgccacaagaaccctgcctccgggtctggtcaccctcaccgcctcccgcagcgcagcaagcttgtccttttcctcatgcagatgatacatcggcccaaacaacagggttacgtcaaaggaatcatcggaaaattttttcagattcattgcatttccctgatatgcatgcacgcctgcacccttctgtttcaagcgtcccagattatgctttaccagttccacggccgtcacatcgtacccttcctgtgccagcggtacgctgtatcgtccggttcccgccccgatatcaaggatatggatttcctcttttgcacgttcttttacaatttcgtccagacactgatggatataatgcatgcttgtcacaaattccaccctgccgtgccggctgtccagacgcttctcttcattaaatttattataataggcttctaagtctgtcatattttaatactaacacattttctttaaaatttcactcacaatcgctgatgcgacatccgctttgctcattatttccagttccctgcagtcatctgccgtaatcagcgtcaccacattggtatctgtaccaaatccggctccggctaccttcaggttattcgccacaatcatatctgcattcttttttgcaagttttgcacgggaattctccagcatatgttccgtctccatggaaaatccacacagaaactgtcccggttttttgtgcgcgcccagatatgaaaggatatcttccgtgcgttccatcgtaagagtggcatccccgtcttttttcttgactttctcatcgaccgggtgatccggacgataatccgccacagctgccgctttgataataatatcctgttgctctgctgtctcctttacggctgccatatccgcggcagatacaaccggaacgacctttacaaacggcggcggagtgattgccaccggtcccgtgatcagcgtcacttccgcgccacggcgcatgcagttttccgcaattgcatagcccatttttccggtagagtgattcgtaatataacgcaccggatcaatcttctcctgtgtcggtcctgctgtgaccatcactttctttccaaccatgtccttttcgcaggcaagatctttcataatataagaaaacagtgtttccggctccggcatctttccggctccggtatccccgcaggcaagataaccactcgccggatcaatgatatgaaacccataatgctccagctttttgatgttatcctgtacgatcggattttcaaacatattggtattcatggcaggggaaacatacttcgggcattttgccgcaagaatcgttgttgtcagcatatcatctgcgattccgtttgccatcttgccgatcacattggcagaagccggcgccaccataaaaatatctgcacgctttgccagtgccacatgctcgacattgaactggaaattccggtcaaatgtatcgaccagacacttgttgcttgtgagcgtctcaaacgtgataggattaataaaattggttgcattttccgtcatgatcacatgcacatccgcatgctgcttgacgagcgcacttgccagataggcgattttataggcagcgatacttccggtcacaccgagtaccacacattttccttttaacattgtctcttactcctttgcagaaaaaatcacatcttctgctattttatcacactttttccctaaaacaattgaatttttgtcatctgttccagtatggaatctttgacagaatcgttcagatatgctggatttaattttctttttgcatatgcaaggtaagaaccatttgtctcttcaatcaaaactgccgtaaaaaaccgctcccagctaaaatatgttttgctttccacatattcccacggcttttccagcacctgatctgcccatttgctttttactacttttgcctttaatatcagccattcaaatgactccggcaaataaagcaccacttgatcttttccaccaatcaactgcatcactctgtcaatttcagaaccaaatgccgcgccgtctgcaattacaagtatgcgttcatttttatgcatatttaaataatggaaaacatttgactttccattcattgtctcacatttcaattgctgttgcctacatacagaattaaaaaactgataaccggaattactgtcttccgttattacaacctctggtttgatatccttctctaaagtctgtgctccatatattctgtaaaactcatgataacacggttttaatgttccgtattttcctgaagtacgaattccatagatttcctccacgctatacggcaaagaaggcaaggattccctggaaataatgacataataattatctgttttctgaatagtatctgcgaattctactgtcttgataaattcgtttccctcatcaataaatacaatactatcctgcattgctgataactgttctttccacagtgagccttcgagcacataacattttttgtcacacgtcagttccacaggggtcccggatggattgtttacgtattcccgaatcatatctaccaatgtggtttttccagttgcgctgtctccccggatgaccgtcagatttcttcgaatttcaaaatcatattttaagcgctttgttgatacaataattctatgttttcccttcat

SEQ ID NO: 81 - DNA, 7105 bp, unidentified
  source 1..7105: mol_type = unassigned DNA
gagggctaccgccctgccgccgacgtgctgatgttcgcccacaagtatggcgaaaagtttcacctgctcaccgaccccgccgagggtgtgaaggatgccgatgtggtggtgaccgccgcatggaacacggcccccggcacccccgaaagtgagcgccgcctgcgagacttcgcgggctttcaggtgaccagcaggctgatggagggcgcaaagcccgatgccatgctcctccactgcctgcctgcgcaccggggcgaggagatctccaccgccgtctttgaggagcacgccgacgagatctttgacgaggccgagaaccgcctccatgtgcagaaagccgtgttggccatcctgctggccggtctgtaaaaacgagaaagagccctggggctgcagaaaattgcagctccggggctcttattgtttctctcagggtctgcggctcaggccggggccctcatcagacaccagagtaggcggagaagccgccgtcaatgggcaggcagataccggtgataaagccggcagcctcgttgttcagcaggaacagcagggcacctaccaggtccttttcgctgtcgccgaagcggcccatgggggtggcagccaggatcttttcggtgcgggcggtgggggtgccgtcctcgttgtagaggagccgtgcgttctgctcgctggcaaagaagcccggggcaatggcgttgacccggatgcccaccttgctgaagtgcactgccagccactgggtgaagttggtgacggcggccttggagccggagtaggccgggatcttggtcaggggcagataggcgttcatgctggagatgttcatgatgttgcagccggggcggcccaccatctgccgggcaaaggcctgcgtgggcagcagggtgccgatgaagttcaggttgaacaccatctccacgccgctctcgtccaaatcgaagaaggtcacggtgtcatcgtccagatccgccatctcgaagaattccttgtcggtgttggcccgggggttgttgccgccggcaccgttcaccagaatgtcgcagggacccagatccgccatcacctcctctgccacctgcaggcagttggccttgttcataacgttgcaggtgtagcccttggccacgccgccttctgcctcgatcgcattggccagctccttcagcttctccatgttgcggcccagcagagccactttggctcctgcccgggccagagccttggcgaaaatggaacaaagggtgccgctggcaccggtgaccacggcaaccttgccggacaggtcggtgttcagaacattcttttccacgaggatactccttttttgatcagatggttgtggtgatacggatgattgttttcaagcggacaaggcatcagaccctgccagcgcccttgtccaggatcttattgaactggaggaagaaggtggtggcggtcacggcagcggcgatgatgtcactgacgggctcggcaaggaacacgccgaacacggggtttgcgaccacatggggcaggatgaagatgagagggatgagcaggatgagcttgcgcaggcaggccagcagcaggctgaccttggcctgacccagcgccataaagctctgctggcaggcgatctggacaccggtggagaagatgcccgccatgtagatgcgcatggcccaggtggtgtaatcgatcagggaggcatccgaggtgaagatgccagccactgcaccgggaaccagcatcatcagcagccagaagatggtggtgtagctcaggcagagggtcagctggaagcggaatgcctgcttgacgcggtctttcttgcctgcaccgaagttgaagctcatcaccggctggccgccctggcagatgcccgagatgggcatggtgcacagctgggaggcgctggtgatcacggtcatggcacccacggccacgtcaccgccgtagcgggccaggctggagctgaagctgatggacagcaggctctcggtggagagcatgacgaaggtggaaatgcccagtgccagcacgggcaggatgatcttcccttccagcttcatgtcctctttgcggatcttgaggatggtcttggggccggtgaggaagcggatgacccagatggcacccactgcctggctcagcacggtggcaatggcagcgccctttacgcccatgcccagcccaaagatgaggatggggtccagcacgatgttgatgaccgcgccgataacggtggtcagcatactgatcttggcaaagccctgcgcggtgatgaaggtgttcatgccaagcacgatcagcacgcagatggtgcccagaatgtagatgcggctgtaagccagagcgtagggcagggtggtgtcactggcaccaaacagccgcagcagggtgggtgcggcggcgtaaaagacgatggtcaggacgaccgagaagagcagcagcatggtaaagctgttgctgacgatcttttctgcctgcttcttgtcgccctggcccatggcgatggcggtgcggggtgcgccgccggagccgatgagcatggcaaaggcgttcaggagcatcaggatgggggtaaacaggcccacgccggtcagagccgctgcgccgatccccgagatgtggccgatgtagatgcggtccacgatgttgtacagcaggttgaccacctgcgccacaacggcggggatcatcagctggagcaggagctttttcacgtcacccgtgcccatatcctgctgttttttctgcgtttgtgccatggaaagtgtctcctttggtttgagcgagacggagagggctgccctcagaacgtcaggccgaagttcatctcgtagtagttgcctgcggcatcacggtaggcgtaagccttgccgttttcgtccttcatgctgtcgggcatgtaggcatcctttgcaaagccgggcacgtcgttggggctgatgcagacaccgtccgcgttcacagccagcacctcgtcgcccttgggcagggtcaggggcagcttgccaacgggagcaaagcggccgaacatcacatccagcgttgcggaggggtaggtgtcaaagccgacggtcagagcgtcggagaccttctccacattgccgacctcccaggccagcgggcagttgatgttggaaacgaccttgccgccgtgggcgtggaccgcagcagcgataccggccagacggtttgcgcccaccagagtggtctccttgtgggtctcggtggtgggcttgccgctctcgtccacgttgcagaccgtcttgtcctcgcagatgtccagctccaggtagcccggggtggcgttgaagtatgcaccggactgggggctgaccatcagcagggccacctgggcctcatcgggggtgtccaccagagtgacattgcccagcatctcgcgcagggccttggtggcggcctcaccggcctcggcgctcttgccaaaggcctcagcgtagaccttggtgccgtccttcaggggcagggtgccgtcgttcttcagcaggacaacggactcgcggtgcacgcgggaagcttcctcccagtcggccttggtggcaacgacctcggcggccttcctggggtcggcgtaggtgtcctcgaacataccctgacggaacagctcggtcagggtgcggctgacagcgcggttcaggctggcatcggtcagcaccagatcttccttcttgaagccggcgggcaccgcgtgggtgtcgtagtagtcgttggtgccgcgggcgtagctctcctcgcccagctcgttgtccagcaggccggagatcaggtccacgccgctctgggtgacagcatagccgatgcgctcgggctcgtccagcatgtcaacgccccagcacatgttgtggacgatgccggtgtcggagttgatgtagcccttgaagcccatctggccgcgcagcaggccgtcgatgaacaccttgttgtaggcaaagccgtagggctgaagctcgatggggttgccgttgaagtcctcctgcggagcgctcttctcggcgctgggcttggagtagtagggcatgatggactcggcattgtggcggatggcggcgcggaatgccgggatgtggtacttctgcagggagccgggggtggcgtagatgttccactggcctgctgcatagtgggggtcaaagccgttctcacgggcaccgccgccggggaagtgcttcacggtcatggaaacaccctcgggggtaacgccgttgctgccgccctggatgccggggatcaggtggtcgaagatctcctcaatcagtgcggggtcctcgccaaaggtgccgaaggtgcgctgccaacgggggtcggtgacgcagtcggccatgtacatgtagcccttcttcaggccgcaggcgttccactcgcggcggatggtgtcggcgaacttgtcgatgatgtcgatgcgtgcagtgcccttgacagcagcagcaatgcccagggtgccgggataggtggcaaacacgccggtggcatcgttcatgccgaacacgacctcgccgttctcgttgcggctgttggacatgacctgcatgggaacaaagtgatcacaggtctcggtcagatactgcagctggttcaggtaatctgccagatcctcgggcgtggggctctcgcgcaggatgacgtggcggttgaagctcttcttgaccatgtcagaggtgctgggcagggactgggagccgaagatgctgtcggagacgttcacgggtgcctcgtccagcaggccgctttcgtccgccacgggcttgtggccgttggctgccagacggggggaaggatacttggggcccatgcgccagtcggaggtgaagatctggccgatcttctcgctggtggtcagaaccttgacataggcctcggcgcgctcagccggggtcaagcgccagtcgttgactgcgctgacggtgccggtgccgtcgatgtccttgaaatacaggccgtcctgctcgatgaccttgcgctccacggtgctgatggtggggccgttggggttctggtagcgctttacacgctcggatgctttcactgccatagtgttttctccttttcttttgaacgcagcggcccatgccacagagccgcagatgctatacctattataataggccgccgcgcggaacaactagaaaaatttttggatatttccgcactttccttgtattctttttttgtgcgcggttagaatacaagcccgttttgtggaatgtgctgtactagtatcttgcaatcatgtgcaaaatgacgaacgctgttttttaaaactgttgatttcgcccaaggagagtaaaattgtcctgttttacctcaaaattttactaacagaaatttgatggatagttcataatgtatacataaaaatcccccggttcgcgatgtggcagccgcagcccacgggggaccgaatgaaaggccggagtgagtggcagcacaccggccgcagaattgaaaggagagcttctctatggcaaaggtcaaacagccgcttgaagaaaacggcatccacagagcgaaaatgtgggagatcatgatgtacgctctgaacaacacctccaccaacacctacatgatggtggtcggttacatcagctacttcctgatcggtatcgtcggtctggcatccgtgctggccggttccattgttaccatcatgcgtatctgggacggtgtcaccgacccgttcgttggtatgatggtcgataagaccaacggcaagttcggcaaaaaccgtccgttcattgtcatcggtcagatcatcatgttcgtcaccaccttcgtgatgttcaacttcatccccaagatgggcactggtgtccgctttgttgcgttcatcatcatctacatgatctacatcattggctatacctgccagtgcgttgtcaccaagtctgctcagacctgcctgaccaacgatcccaagcagcgccccatcttcgcaatgtgcgataccgtgtacaacatcatcctgatgaacatcgtcatccctgtcatcgttaccgacagcctggttcccaagttcaccctgactgccgaggccaacgctgcagagatcgcttctctggtggcacagaaccccgctctggcaggcatcgtggagaagtctggcggcaacctgtccgctttctacaaccccggcctgttcaccaccatgcagctgatgttcggcggcctgtctgcagtgtttgcagtctgcgccatcattgctctgtggcgtaaggaccgtcccaagtacttcggcctgggcaccacccagaaggtcggcgttaaggattacgttgacaccctggctcacaaccgcgccatccagatgctggtggtctccgcatctaccgataagctgttcatgtctaccatgagcaactccaccgttatgatctgcctgttcggcatcatcttcggcaactatgccgcattctccagctactctcagatcacctctatccccatcgctctgatctccatcctgctgatgaacaagatcgctcgtcagatgggccagaaggcatccatgatgaccggcacctatggcggtatcatcggttctatcatcatcaccctgttcctggtctttgtgaaccccaagggcgatgcttccaagtttgcgatccccgcattccgtatcatccgtcccgacacctggggcaccctgttcaccggctggagtgcagtgggcctgatcttcatcctgctggtcatcgcatggcgcggtgtgcaggctctgtcctcctctatcgttatcaccatgaccgctgactgcgccgactacgaggtttatcgtaccggtaagtacgtccccggcctgatgggcaccctgttcagctttgtggataagctggtctcctctctggcaaccactctggtggccctgttctactccatggtcggcttcaaggacgctctgcccgataccctgactccgtactctgacggcatcttctgggcaaccatcggctgctttgtcctgctgcccatcgttggctggctgtgcaacgttgttgccatgcacttctatcccctgaccaaggagaagatggaagagatccaggctgagatcggccgcatcaaggctgaggctgctgcaaagcaggcttaa

SEQ ID NO: 82 - DNA, 25693 bp, unidentified
  source 1..25693: mol_type = unassigned DNA
atgagcaatgctacaaaagaaactgtcattgttcttgatttcggcggtcagtacaatcagctgattgcaagaagagttcgtgagtgcaatgtgtattgcgaaattcttccttataccgttgatattcagaaaatcaaagacattaacccaaaaggcattatcttcacaggcggtcctaacagcgtttatgacgagtcatcaccgcattatactcctgaaatttttgaactcggaatcccgattctcggcatttgctacggttgtcagcttatggcatacacgctcggaggcaatgttgtttcggctacagacaattcatcaagtgagtacggcaagacagttacaagatataataacaatgatatactctttaaatccgtaaagagtgaaggaatttcatggatgagtcaccgtgactatatcaatgaagctcccaaaggattcagcattacagctacaacggatgtatgtcccgtagccgcaatgtcatgtcctgaaaaaaagttttacggtgttcagttccatcctgaagttaatcatacagataacggtaaagatatgctccgttcattcctttatgatgtttgcgaatgtaagggtgagtggaaaatggaaagttttatcgacacaactgttgcacagcttaaggagcagattggtgacaagggtgtagttctcggactttcgggcggtgtagattcatctgttgccgcagcacttctcagtaaggcagtcggtaaacaacttacctgcgttttcgtggatcagggacttatgagaaaagacgagggcgactttgtagagcagacctttacaaagctttttgatatgaactttgttcgcattaattgtcaggaagagttccttgcaaagcttaaaggtgttgaagaacccgaagaaaagcgccacatcatcggcacagaattttataaggtgttctggaacaaaatccgtgaaagctacggcgagggttactttgcacagggtacaatttatcccgaccgtatcgaaagcggtaaaggcgatgccgcaaaaatcaaaacacatcacaatcaggttggtatcccggaagatattgactttgcaggtgtaattgaaccgcttaaagaccttttcaaggatgaggtaagagtagtaggtgagaagcttggacttccgcatgacctcgtatggcgtcagccgttcccgggtccgggactcggtgtgcgagtaatcggagaagttacagccgaaaaggttcgtattcttcaggaagccgatgcaattcttcgtgatgaaatggataagtgcggttacgcagataaaatgagccagttcttcgcagtcctcccgggtgttaaaaccgtaggcgttatgggtgacgcaagaacatatgacgaactcatcgctctccgtgccgttacaaccgatgattttatgacagccgactgggcaaaaatcccctacgaaatcctaggcagagtctccaaccgcatcatcaacgaagttgaacatgtcaacagagtagtctatgatataacaagtaaaccccccggaacagtagagtgggaataatatcaagtgttattgtgcaacacccattatcctgtaatgtgtaaattttaatatccttgagcgaccttgaagagcaatcttttaggtcgttttttctatgcccaaaagtccagtgtttatcggacttttggcaataaaactatggttttattcggagtgtaaaaaaacagatatgagataacaaaaattaccccaaagagagtagagaaatttgcacaataacaagactaaaatgccgaaagcctgtatttatgcgggtttccggcatttatttaaacagttgcaggaggctttgctatacaaatatttatattttgatacctaaaccgtaggtgacttaaaaaacgccgctaatttctgcgccgtttttatcatatactgaacctccaatatgtacagcgtcttttgcaagacctgcatatccatgcataatgacagatacgctgttaaaggaaaaatctgtgaataaattttgtctgttaatgctgacagatttatgatacaatagtgctgttagtttgaattgaaaagtgggtagaagtataaagaatggggaaactgaattttacaaaagcacttaaaaacgcattaccgtattattaacgcttatacttgtcggtataatgacttttgttgcggaaatattgggtgagggggagataatctttcctgaaataacggcacttgcaattggttatatggttacacaaaagcaaggttggaaagtaaatgacagacgaatgattgcgttaattgcgatttgcgctgttgcgggtgtgctgacagtccgatacataaaagtcgggctttatcttgaaatattgattgcatttgtatttgcacaaattctctttatgctttcgggaacaacatttgcaccgatgatttcggcaattgtgttgcccgttatgatgcagaccgagagctttatatacccgattgccgcatttttgctgacaattgcggttgtattattccgtagatttcttttgaaagttaaaataagagataaagaggattttcagtcggtaaacctgcatgcaaagagcgatgtgattgacacagccgtaagaacaatctgtgttgccgttgtgggattcttcgcaatttggtcgggctttaaatttgcaattgcaccgccgttgcttgtggcgtttacggaattttcccgtccgaaaaataaggctcgcaacaagccggtaaagacggttttgctgataacagtctgtgcatttgtcggagcggtttcaagatatgtgctgaatatgactctcggattgccgttgacagttgccgtattaacagccacggcgataatgcttgtaattgtttactgcacaaaaatgtatattccgcctgccggagcattgacaattttgagtatgattattccgagtgaaagcgtacttttgtacccgttgcagatacttgtcggaactgcggtaataatgctgatttcacggcttttgtttatgaaacggcaaaattaaaataatcttaatttagttatattattctatagaggaaattaaatggatatatttattacaattttagttacattttttgcaggaatgggcgcaggtctcggaacaggttttgcaggaatgagtgcggcggctgtaataagtccgatgctcataacttttcttaatatggatccgtatatggcagtcggaatcgcactttcgtccgatgttctggcgagtgcagtttcggcttatacataccataaaaataaaaatctcgatgtcagaaacggtttgattatgatggcgagtgtgcttgcgtttacgattgttggcagttatgttgcaagcattgttccatcagctacaatgggcggattttccgtgtttatgacatttttgctcggcataaaatttatcatccgtcccgttatgacaactaaagaagctatgctcggtgtgtcggcaaaaaagagggcaatccagtctgtaatctgcggaatgttaatcggctttatctgcggatttataggtgcgggcggaggaatgatgatgcttttgattttgacgaccgtgctgaattatgaattgaaaaccgctgtcggcacaagcgtattcattatgacattcaccgccctgacaggcgcagcttcgcactttatgattggtggcacacccgattggtttgtgttcattctctgcatagcgttcacccttatatgggcgagaattgccgccgtctttgcaaacaaagctaagcccaaaaccctgaaccgtgcaacaggcattgtcctcgtggtgttaggtgttgttattatgggatttaagcttttagcaaaataaaaattgacagtttaaaattcaggtcggacaatagatttgtaaaatacaaaatttctgttgcccgatttttcaacggttatgttggggctaatcgagtagggcgaaacgagtgcacgctttgaacaatattcagggaagtatgcttttttaacaattgcattattatttcacaaaaaacaaaggagctgcgaagaacgaagtcttaaacttcatttcttcacagctccttaaattttcgtgtcagatgtgctgtactcagcttattcccataagctccataacttcaataagttgttttgcagcgttatcggaggtcacaaccttgctttctgttatgacacgaccgaccgatttgcctttatgaataaatcctgaaaccattttgtccatccgatgactgccgacaaggagtcggaaggcatatcttcaaagaacttttcaaaatccttcatcgctctgccctttccgacccataagatatctctctgctccaaatctatcacgcaggttgcgtaactcagttagggggcagactgcttttaaaactatagcttttgagtaggggtgcaaaatgaatttttagttattataattcattaacggaattatatccttccgacttaatctatcatttgtggagttataattataatttattatagcatacaatcgtttgataacgataataattataaacttttaggttttgcacatgagttgcgaacttttattggacaaggcagatagacacgcataggagaataataatcggtgcttttaggtttcatcagattcaaaataaatctaatgccgtaaatgcccattgcatatacaggtgcgttcaccgtagtgagcggagggtttgtatatcccgaaagctccgtgttatcgaatcccataacagaaatatcctcaggaattttgtaaccgttttcttgcagagctctcattgcaccgattgcaatatgatcacttgccgcaaaaatagctgtggggagattccctttgctgatcatttctgacatcattttataaccagatgatgttgaaaatttgtcctgtataataaacccatcatatttaatgtttagttcatcgcaaatgtctgtgaaagtgttgagtcgtttatcaggaaatatcgttccgtcctcaagctgttcaatgcctccgataaagccaactgttctatggcctaaatcatatagatatttaattgcatcggacactgcctgacgaaagtcgagcgatacggatgtgatttcaatattctcaacggtcatatcaagaaaaacaattttattattcaaagaatgcagtaattttatttcttgtttactaaactttccgaggcagattatgccatcaacatcagaaagtacattctgatagtcattgtctgttttaaatgttcgtacaatacttatattattttttgaacagtagtcctcgataccctgtctcatcaaaaagtaataattatcttcaatttcctgtttggaagagaaccattgtagaattccaatgcgacatgaaggtgctgatgtaaccctttttttctttacataattaagttctttagctgctgcaaatattttttgctttgtttcaagcgaggtgctgagggtagtgtcgttattaagcactcttgaaacagtagctactgatacatttgcctttttggcaacatctctgattgtagccaattgaatcacctcactaccattatagtgaaatattactaaaaaatcaagttgtgtttagtgaaaaacagagaaagcaaaaatgtttaccaaaaactattgacagtttacgaaacaaaacatataatttacttaacacaaaaacaaaagaaacattattattaaataataacgaaatcttttgtgcaggttgtcacggcgtttcatttaaaattaaaaggaggaataattatgaaacagacatcatcacaaccaagacttgatggcaaaatcccgggtagaatcaaatacacctttgctttaggtgccctcggcaaagatatgatttatggtatgattgccacattttcaatgatttatttcacagacatcatcaaggttaacccggtatttatcggcgtaatgttctttgttgcaaagttatgggatgcctttaatgatttgtttatgggtatgattgttgataacacacgcagcagatggggtaaatttattccatggcttgtaataggtactctggttaattcaattgtatttgttgttttattcacagacttccacctcgatggcgttggactttgcgtatttgcaacagcagcttacatactctggggtatgacttacacaattatggatattccttattggtcaattattcctaacctcacttcaaatcctgaggagagagaaaaagtttcggtacttccgagaatctttgcaagtatcggacagtcacttgttattgcaggctttggtgttcaaattattgaggctctcagcggcggcacaacaaatcaggcaggttatcacagatttgcaatcataattgcaattgtatttattcttacaatcggtattacagtaatcaatcttccgaaaaagagagatgattctgttccggaaaagaaagttaagtttaaagatattttttcaatcatcggcaagaatgatcaacttcgttgggcggtaactcttatcttcctttacaacatcggcattcagtgcattatgggtgttgctacatattatttcaaatatgtttgtggcaacgcaggaatgatgtcatcatttatgatcagcgcatcaatctcagaggttgtaggtcttatcgtatttcctaaggttacaaaatttctttcaagaaaaacttcgttccttcttgcgtgtcttttacctgcatttggtcttgtaatgcttttgttcgtaggtatttttgctccgcacaatgttgtgctcacatcaatctcaggtgttattgtaaaacttggtacaggtcttgaacttggttgtgcaacagtattccttgcagatgttgttgattacggtgaatttaagcttggaacaagaaatgaaggcgttgtattctcactccagacgcttatcgtaaaatttacagcagctcttacagcactcggtattggtgcggcacttggaagcacacagtatattccgggtcaggaacagtcatttgcaacagtagcatcaatcagtacacttatgtgcattgttcctgcggtttgtatgcttattgcttatgttgtttacagaaagaaatataaactcaatgacggtatgatgaagaaggttataaacacaatcagtgcaagaagagaaggcaagattgatatgacacaacagcttgatgaaatcggtaacacagagccttctatgttccttcctacagttgcggaaaaggcaggtaaataaaatgattgatactaaaacagcaattgaaaaaattacaaacggcgaatttgataatcttttcactgatatatatatagattcatcaatgattgattatcagaaaaaaagatatgttcatgcaattgagcagtatgaaacaattttttgccctgataaagtagcaatattcagtgctcctggcagaagtgaggtttgcggtaatcatacagatcaccagcacggaatggtgcttgcaacatcaattaatcttgatactattgctgtgtcggccaagaataacaatgatgttgtaagatttgtttctgacggttatgatatgattactctcgatataaatgaccttgaagttaataatgatgaggcaggcacaacggtcagcctcatcagaggtgttcttcgtggacttaaggatcatggatacaaaattggtggattcaatgcttatgcaacaagtgatgtacttgttggtgcaggactttcatcgtcagcagcttttgaggtagttgtcggaactattatttccggtttatataatgatatgaaaataaattcagttgagattgctcagatttctcagtatgctgaaaatgtatttttcaaaaagccgtgcggacttatggatcaaatggcttgttcagtcggaggaatggttaacattgactttaaagatccgacaaagccaattgttaagaaagtacctaccgaatttgaaaaatacgattacagtctttgtattgttgacacaaagggtgatcatgttgatcttacagatgattatgctatgattccatcggaaatgaaaaaggttgcaaattttctcggagaagattatctgagagattgtgattcaaacgaattttatattcgccttgacgaaattcgtgaggctgttggcgacagaccggtacttcgtgcaattcatttctttaatgaggagcataacgttaaaaatgccgtttcgtcacttgaaaacggtaagtttgttgaattccttgacgcaatcagaaaatccggtaattcatcgtttaagtatcttcagaatgtatatacaacaagagatattcaacatcagaacatctcggtagcccttgcactcagtgaaagccttcttcgcaattacggcgtgtgccgtgttcacggcggtggatttgcaggtacaattcaggcgtttgtcaaaaatgattttgtaagtaattacaaagaatttataaataaaattttcggagaaaactcatgccatgttctcaaagtgagaaaatacggcggaataaaagtaatgtaattatgtaggttttgtttttattaaggaggacaaaatgaaaattcttgttttaggcggtgccggatatatcggttcgcatacagtttacagacttattgaaagcggtaatgaggttgttgtattcgataaccttgaaacaggtcatatcgaggcggttcatcccaaagcaaaattttataaaggtgatctcagaaacagaagtgaaattgacagcgtttttgataaagaaaaaggtattgatgctgtaattcattttgcagccaattcacttgtcggtgaaagtatgaccaaccctctcaaatattatgataataacctcaacggcacaaaggttttgcttcagtcaatggttgctcacggaattgataagattgtattttcatcaacagcggcaacatacggtgagcctgagagaactcctattcttgaaaccgatccgacaaatccgacaaactgctacggagaaacaaaaaaatccatggagagaatgttctattgggttgaaaaagcacatggtttaagatatgtttctctcagatatttcaatgcatgcggagcacatatcagcggaaaaatcggtgaggcacataatcctgaaacccaccttattccgattattcttcaagcggcacagggtacccgtgaccacataagtatttttggtactgattatcccacatctgacggaacttgtattcgtgattatatccatgtcactgaccttgcacaggctcatattcttgcagttgaatatcttatgaagggcggtaaaagtgatatattcaatctcggcaacggtgtaggtttttctgttcgtgaggtaattgaaaaagcaaaagaggttacacagaaagatattaaggttgttgaagaaagcagaagaagcggcgatcctgctgtattgattgcatcaagcgataaggcgaaaactgtacttggctggaaacctgagtatgatgatctgggaacaattattaaaacagcgtggaaatggcattcaacacatcccaacggttatagtaagtgaggcggtatttatgaagaacagcgtttacggcttaatattaagacttgtttcatacggaatcaatacagggcttattgaaaaagaggatataatctacacgcaaaataggcttttatcgttgttccatatggatgaaccagatgacagttgtacttgccttacagcagataacgaggatactcttgaagaaattttgtcgggacttcttgattatgcatacgaaaaaggaatcattcccgaaaatacagtaacatatcgcgacttatttgatgtgaaacttatggcttcacttgttaagcgaccgtcagaagtaataagagaattttggcagaattatagctgttctcctaaacttgcaaccgatagctactataaattcagctgcgataccgattatataagaagatatcgtataaaaaaagacttaaagtggaaaacatcaaccgaatacggtgatattgatatcactgtaaatctttcaaagcctgaaaaagatccgaaagctattgcagcggcaaaacttcaaaaacagtcgggctatccgaaatgtttgctttgtaaggaaaatgaaggatatgccggaagagtaaatcatcctgcaagagataatcacagaattattccgctcaccattgacggagataactggtttatgcaatattctccgtatgtttattacaatgaacattgtattgtatttaacggtgagcatacaccaatggtaatcaatgattccacattcagaaaactgtttgattttatttcacagtttccgcattatataatcggttcgaatgctgatttgccgattgtaggcggttcaatacttacacatgaacattttcagggtggcagatacagctttgcacttaatagggcagaggttgaaagaaagtttattgttaacggctttaatgatgtggagtgcggaattgtaaagtggcctatgtcagttgtaagattgacaggtaaaaacaaggacagcattatttcattatcttctcatattctaaagagttggagagcgtacacggacgcagatgttggcatttttgccgaaacagacggtgaaattcacaacactatcactccgattgcttttacaaaggatggaaaatttgtaattgacctcgttctcagaaataatattacaagtgaagagcatcctctgggagtatttcatcctcatgcgaaattgcatcatattaaaaaagaaaatatcggccttattgaagttatgggacttgcagtattgccctcaaggcttaaagatgaaatggctattttaaaggatgctattcttaatcacaaggatgtaagtgaaattccgaaaatcagcaaacattccgagtgggtaaatgaatttgtttcgcagtatgatgaaatcaatgaaaataatattgattcaataattcaaaatgagataggaaaggtgtttcttaatgttcttttggatgcaggtgtattcaaaagaactcctgaaggacaaaaggcttttgataaatttataaagacgctgtagtaaaggaagtgctaaaatgtcaaaggtaagggtagtgaattttgaacctacatccaaaggtgaaaacactcatctttatataatagaaaataacagcggagcaagcgtgacattatgtgatttaggcgcaagtgtcgtttcgataaaagttcccgacaaaaacggtagtattagagatgtagttctcggttatgagcacattgacggttatgaatttgacggaacatacttcggtgctactgtcggaagatgttgcggaagaattgcttacggcaagtttactcttaacggagaagattatcagctacctgtaaacaatgggagtaaccatctacacggcggatttaacagctttagccgcaaagtgtggcttgcggtagttgatgataaagttccaaatacagttctatttatgcttgatagtcccgacggtgatgagggctatcccggaaatatgaaagtttttgtacgctacacttttgatgatgaaaatgtacttacgataaaatggtcggcagtttccgacaaagacacaatatgtaatctgaccaatcattcatatttcaatcttaacggacataaaagcggtaaagttacagaaaatcacaagctgaaaataaatgcaaattccttcataccgataaattcaaacctcaatcccacaggagagataactcccgttaagaatacatcgtttgattttaccgaacccaagttaattggaaatggtattgacagaaaaaacgagcagattggttttgcaaacggtattgatcatatgtttgtgctgaatcattctgatgaagaatttgtgcttgcggccgaagctgagggtattgatagcggaatcacattaaaatgctatacttctcagaaaggtgttcatgtatatacagcaaattatgtcgatgttttgtccaatatgggaaaggattcagcaacatacggagaaaacccagcgttttgtcttgaaacccaaggctttcccgatgctgtaaatcacaagaattttcctacgacaatattaaaagcaaacgaaaactatacacaaactacgaagtatatttttggtataaacaaataaaataagctgatttctaactcctttaaaaataaaatctctctaaaatcaaggaccgcctattttttcttgggtggtccttgatttttaaatctatgaggatgtttcatgttttacagtattacaccgtcttaaacatattctgttttagcggttatgtgcaattctgcctgaaaatcaccctgttctgtttgcaccgtaaaaccggaacattcctcttgcacggctgtttttacaaactgcatttttcaaatgcaaaaataaaattattgattctgtattgtctaaaaatcctttgttgtatactgataaggcagataagaaaaatcacggcaagggaatttctatagtaaaaagtattgcccagaagtatgggggagatgtagttatttcggagaagaataatgaatttatagtttcggtaattttagacaaccgaatttttacctaaaaacccactatttttacctgattaaaatcaaatattctaaaaaatgctattcttctttaaggcgttatgccaagaaaaaggatagcatttttgttttgtattgaattttatgttttagccgtatttgcgttaattccgttattatactttggccttgtgttgcaggaatttgaaacttttattatcaaaaaatttaaataaggtttaaagctaataaggtttgaagctgcttccgtaaataagaattatagagtacaatttttgtcgatttttttacattttttgcacaattgaagtttacagtgctgttttgagatatgatttaacaaagtaaaagggaaaagcaagccgtaatatttaatataaatcaaaaattaaggagagttgaattttgaaaaaggatagaaatttgcgtagcgttaatactgacggaggggtgaatttgcaattcaaacttttgtcggcaatcggaattataattatcgtgtccggacattgttatcatggcggaatggaacttgcttataactggtttccgccgtattcgtataatttggcactgtttgtatttatatcgggatatttttacaaaaccgattatgaagaaaatgtcggaaaatacatatggaaacgaacaaagcggcttcttattcctgcgtatctgtggaatatattttacggtggtatggttgcatttctcggtttgtttggatttactataggtgcaaagcctgatttatacaatctttttgttatgccgtttgttgacggtgaggcttttcaatataacctcggttcatggtttgtgtacccgctgtttttggtttgcataataaatgtgctgttcagaaaatttttgaaactgattcaccttgacaatgaatttatagttttgatagtgtatctcgcaatcggaatgataggaattaacactgcaatagaaaatccgactgcaattaacggtatagtgaaacttcttgtcagaacaatgttttttctgccgtgttatgaattcggtcgcttttataaagctgtgcttgaaaagaaagacactctcaataatgttgcgtactttgcaattatatttgctgtacagctgatacttttaactttttgcaaagatttggagtacactccgtcgtcatttactaaattcaacaacggttttataattccgtatatctcgtcaatcacagcaattgcattttggctgagagtttcaagattacttgtacctgccataggaaacagcaaacttgtaaggcttatagctgacaacacatacggaattatggtaaatcagcttgtaggctttatgtgcctaaaatttgtattctacggattaagccggattacttcaggctcattgtttggtgactttaatgttgaatcatttaaatcaagtatatggtactactatcttccaaacggtttgcaacagtgggcttttgtatatcttatatttggtctgtttgtaccgatattaattagcattattttaaataaaatctgtcatattgcacacagttctatttttaaaaaagtatagttattttgagaataacggggatgcagattaatgagaaaataatttcaatatttttattaaattgtaaattcataatgaaatacagatacaaaaatcttccataggtaagcccacccataagtcactgaaattgtaccaaaacaatagatattatgttgtatttgctttttgtttgtgatacaatttaaagcgaaaatagcaacagccttaatgatgttgcaagaatgatcgacctttcgggtacagaagttgcgagctatgtctatgacgcttggggaaatataaaagacacccgaggcgagccgacaattcgtgaattaaatccgattcgctatcgtagctatgtttatgataccgaaacttcactctattatctccaatcccgttattatgatccttttgtaggaagatttttgaatgcggacgcttattgtgatacaatgtcaagttctcctttaagcaccaatatgttcgcttattgtgagaatgattctattaattacgctgactatgatggatttaggataactgtaaatgtaaagcgaaccaataacagctatgatttaaaagtcaaattaccatggagtgacatttccaattattttaattatcttagtatagcttatggaatagttggacttgttgcatgtttcattcctgaacccgcagtttctaaggctttaggtattgctgcaggaataacttcattggtttcagctattgcatcaacattgatttctaattacaaaaaaataaaagtataaattttaaaatgtcatttaattatcagaaagttaaaaagactgcgtatttctatattattaatacatggtggttaaaagtaagaataagattcacagccaagtcaatacgaatatacaacttgaaatggagtgttacacattgaagcctatgtcaatatttttagaaattttgtttttatttggcttaataatatatatagtatatgtttttgtaattaaaaaagactactctgtatcaaggattattatctttgcaatcttattgttgtcttttgtaattaatgtaattaatatgttatacttgttttttcaataacatttttgcaagattttattcaaaataattttaaaaaatttaataaaaaactacctaacggtggtggtcggcaaggtcctggtggatggaagatagcaataaatgttgcgaaacatgccggtagtgatttgaaattattggataaaacgggcaaaagaatagccaccttatgggaagatggtagtgtaaggggaaaataagatgaatacatcagaaatattaaaagaaatgaatattaccttttatgatgaaaaagatagtttatttgatttctttttaaaacataagggaactaaagtattggatatatttccaaaaacaataaatgacaatgaaaaatattgaacagttgaggtgttttatcaaaaagttttagatcattgtatgaaaaagcaggagtttgaaaacatagaaaatcgtttttcatattttgttaagattttatggctttataatgaaacctatgttaatattctttctcctgaaatttttaataattattattataaacgcaacaagaagattttaaaaaagaatagtatagtgaacttaaagtctattgccggtactgatgaatttttgttgatcaaagataaagatgttttaggttcagcctgtattattgcaactcgtgatatttctccggttgttttttatttcagaaattctaaaatcctgtttttattaaatggatgcacaggactactttattatggctttccaaaagatatcttatttaccaaacgagtggcaaataattgctcattgtatttgcataaagcagaggcaaataaatagaagaatagcaatacttaattaattgaaaaactattattatttctattaataaggtaaacatttttgcaactttcaataaggttgggtagaacatttgcgttaaggaggctcgaaagagtttccttactggttgatggaattgaatggaacggaaaaacaggaagagaacatataaaatcttggtattaaaaggtagcatagatgattatgaatattgatattaaaacatatagctatagcaaaattaaaacatttgtgaatctcagatatttatcaatgcgaatttctgacttaatatttaaaatgttaagctattttgcatacaactttttaatggtattaattataacctttcagatatttatgatgcaagttaacccatttgaaggtttctcggtttttgatgatcgtgtagtaccatttcttattactgcaggaattttgtcttgcattgtgtcaattgtaaccgtatttatctatcactataaaactaaatggagtgtgatactaaacaggggagtgacattcttttatgtttcaattaccatgcttttactttcatgttttattgagtttaagattacggcatttaatgtgatatatgttatatttaagattgcaatatatgttctttgttattttatatatgtaaagtatttgtttgagaaaaagttgccaaaaattgaggagatagttcacaatggaagatcgtttcctgcaggaatgatagcagttgctcttaccatcgctataaaacctgttataagcctcttaggtcaaaatggtgttataagttttgtgatatttaatgatttgattgcactaactgaatatattggtgctgtctgcttaatcattaatataatagacgctttagttaaggcatattatgcaaaaatatataacatcaattaacttactaagacactttttacaataaggtagggtagaacatttgcggtaaggaggctcgaaagagcctccttttttttgcctaaaattcctgtaaacccattttcgtgttgcaagaatgactgatgaggacggtagaatagagagggggagagatgttgaaaatataataaaaacttaggtgcaaatacacttaagtttcaagtaagtgcttgatattttgcaaaaatggtggtatactatacttgaaagtcaggggaaaatacccgtaagttttaagtgagtggaggactacaatgcagaacattattaagcgtgacgaatatcttaacagaattattgacagaaaagaaaacggactgattaaggtaattaccggaatcagaagatgcggtaagagttttctgctgttcaatctgttttacgattatctgattgaaagcggtgtaaaagaagaacagatcattacgattgccttggatgatgatacctttgtaaagtaccgtgatcccgatgaattgtcgaaatatattcgtgggaaaatcgtgaactcagatatgtactatattctcattgatgaggtgcagtacgcaatcacaaaggatgaacttaaaaaccctgagaacattaagctttacaatgtactcaacggtcttatgcggcttcgcaatgttgacatttatgtaacaggcagtaattcaaaaatgctcacgaaagatgtactgactgcctttcgtggcagaggtgatgaggttagagtttatcctatctctttcaaagagtattattcttttgtgggcggagataaatccgacgcctatgaggaatacgctttatatggcggtatgccgcttgttttaacaaaaaagagcgatgcggagaagatgaactatttgcacactcttttcacagaggtttatttcaaagacattgtggagcgttatgatattgagttgcctgatgtgctcagcgaattaacggatgacctttgttcttctgtgggttcgcttaccaatgcaagcaaaatatcaaataccttgcagacggtgaaaaatattaaggtttcaggtacaaccgtttccaactatctgaattatctaattgaatcgtttctgttcatcaatgcgaaacgatacgatgtaaaaggcaagaagtattttgaatatccatcaaagtattattgtgccgacatcggacttcgcaacgcaagacttaatttcaggcagcaggaagaaacgcacataatggagaatattatatacaatgaacttctgtgtcgagagtattccgttgatgtcggtgttgtagaaatcgtggaaacgagtgtaggaaagaggtcaaaaaaacagtgcgagatagattttgtagtaaacaagggttctaaaaaatactatattcaatccgcactaaatgtttcggacccgtcaaaacttgaaaccgaactcagacctttgaagaatacaaaggatttctttaaaaagattattatcagcaaaacttcaatgaagtcttggacggacgaggacggaatacttcatcttggactttatgagttcttgctgaatgtaaattccctcgaattgtaaactaaataggctcaatgtcaatagttacggaaagccgaaaaataagaatgtatgaaatttataagcaacagaaattgtaaaagagcaagtgatacacaactaagaacaaggcacagcttacggaaaaatccgttcagctgtgcctttgattgtgtttgtgaagttgtaatgctgtttttattacggctttgacaagaaaagtgtgcaagctattttttaacttacacactttattttacaagctcactgcaaaacttttaaatttgcaatttctttccgattcttaattccatcaattagatctcatcttgctgatatcagtattattaggtattggaatttctcattatataatgcatttcattagtcaaggaattatatgattcgattactgcgttatctccgaatttcaaacacaatgtttgaggtgaaggtcatatcatcctcattgaatttcatatttatttcaccgtcatattttttaactactcttttaatgcttttcagtcccgttccatgtattgcgtcagatttttttgatgatgctatgcggttgttcttgacggctacaatattcttgaccgaatttgtaagctgtattgacagatacttatttttgcggacgaaagccgaaaaatctataaatccgttctttgtattttgtgccgcttcaactgcgttttcaagaagattgtcaagcagagcagttatgtcgggttcgctcataaagctaaaatcagcacttctgatgtcaatattcatcttcactccgaacttgtcacagaaggatttgtacctgttaacgattgaattgaccataggattgttgcagtaatcaacagatctatttatgctgaagtcttcaataaaatcgtctatgtactctgtaacagccttgtctttggcaatgctcttaatggcgtttaaatgccgttttatgtcgtgcataacaatttttgagttttcattttgctcattaagtaaatcataatactcagctgtagatttttccttttgcctttcatattccaatttcatattgtgtctttgagttttcaaagtaaattcatatacccaaaaaaccgctatatttgagaaaagtaatagcaccatacttattattaataaatatatgtatttttgttctaaatcaaaattgtgtagcgcatgtgatactgcatacagtagcagaatacttgaggcaggtaaaaccaagagaggtatagaaagagaataactttctgatttatgttcttttattgagaattttgatacaaagtaaattatcaaaaaatataacagtttactgatagtcgcttgaataatgagacttaaagaattatccatggaagtgaaaaaatccgtaccgaataatactgttgaaacaaacaagacaatactttctgtgattgccataaatataagtaatatgctacagtggaaaatacaggatttaatacttatgaaataacaaaaataaagtaaaaagaagttacacgcaaaaaatgcaattaaattaaccaatgttaaattcaataatcgagataaatacaataatacatacacaataacaactgaaaataacaaaaattttttgcttgattttctttcaaatttgttttcaaaataaaacagtgatatcagaatttctgcaagaaaaacaaacgcatagcaaattgtatataccatttttatacccctatgtatgcaaaatatgcctttttaaagtttgaatagttcctttgagatataggtagagtttcactttttaaatctacattaatattaagctcagtcttattaaaatccgagacatacctcagattaacaagataactgtaatgtggttgtgcaaaataatcgtaatcctttagtttttctttccaataacttaattttttatttgtataatacttcttctgacatgttataataacagcctttctttcttcaatagttatatatactatatcacttgtgaaaacagagtaacactcgtcataatattcaagagttattatttgagtattggaatgaaaataattaatagccgtatttagcgctctgaaaaaacggttattgtcaataggctttgacagatagcgaaacacatccaaatccatagcgtcatcaagataagcgtcatgcgaggttataataaaaataattatattagagtttaccttttttaattgtgcggacaaagtcagaccatttaccagaggcatttcaatatcaatgaacgccatatcataactgatattactattcagcagctctacaccattgtaaaacaaatcaatatcaaaaactattctatgtttatctgaaaatgtattcagattgttttttatttcatcgacaatacatttatcatcgtcacaaattaatactttcaaaagaaaaacctccttgaaataatgtatcaattataacatatatttcaaagaatgtcataaaatatcatttattaaatgtaaaattttaaattttgtatcaatgcatcaataatttaaaaacacatcactttggacgaattcgacatcgtttttgcagaaattatgtttaatttttaaatatgtgctaaaatttctacaaaaggaggagcattattatgaagaaaataaaaaaccttattcgcaaaatttcacctgcaattatcgcttgctttacattagcactctcaataaatgctaattcatctacttgtttttttatgtatcagcctaaggtacctgcaaagcttgacaaatttaaaaagataaagtaatggaaaaattcagctcaaaatttgtggagttttttgtatccaacaatcttataaaaaacgaagataaagagatttacgaatatgcttttaatattattttatcatcgttaatacatattgcaaccgttatgataataggtttatgctttaatttatttattgaaagtttagcattctatttttcttttatcgctatccgtaagtttgcgggcggctatcatgctaaaactgccacaagatgttatttgttttcatcgttaataaacattatagttctatttttaataaaactattttgttatgtgagtatatactttttgatgatactaatcgttattgaaatactatgtgtaattctgatttcgcatatagcaccacttgattctgataataatttactaaacggtaaggaaaagaaattctatggtaaaatatcatgttctatatctaccgctttactttgtatttctatagttacaattaatttgaattatataaaaataggtatttcaattatgtttggagtttttatgagtgctgcagtcttattagctaaatatgttcagaatgtttttcatagataataaagatgatgaacatgtatttcaatatcagaaggttaacctaagttttacagaaaagagttgagtccaatggaattaatttgtttaaaaaatcaaaattgtaatcaaaaacaaaaaggagtatatgaaatgaaatctaaaatgaaaaaaacagtagcaattatcgcaactgttgcggcagttttgtcatttgcagctataactgtaagtgcaaaaacatacacttggacgcatactgtgtctgttgcaagcatacctggttctaccgatagtataacagcttcgatgggtggaaaaggaagaatgtctgatacattttcaagttacccaactatctttgatggttacaaagtatccaataacaaagcaagagccgtcaatgatagtaccggtgttagttatggatggaaatcttttaccttaaatagtaatggtggacctgttacggtaacatatggttcgtctcttgttaagggatcttattatgtacagtatcaaaatgtgagtaaaggtggctttagatcttcatctgttttttcaaaaacctattaaagaactaatcaagtatgctgtggtagtattgccacagcataccgttattaaggcattgtggtggaatagatggaactttttaaactaagttttttatcgaaagcatatattaaaggaaataaaaactgcaagacaattaaaatcgtaacttgtatattatttgtggcgattactgtaatatcaagctttgcaacagtgactgtaaacgctatgaaggagagcaaagaagattacaaatcaagagcactttttctttctccgtggataaagccgcttacagatgatattatcaaaaaaatgtcatcaatagaacacattgaatatattgatgattgcacagctttatacggtataaattcctatgacatagctgacacggatgacaacgattttaaatcggaatttataaatcataaattcacttccgtggatattgccggactgtatgagcacgaagaaaagagcgtaattgcaggggaaagccttgactctgcgccgatatacagttgtattgttccaagcatattttatccatttgaggataatgatggcaatatgcattacaacaatcttgattacatagatggtacaaaactcataggcaagaccattacggtcaaaggttgtgaagataaaatatgtgtttcttataatatagctgatgaaaacaatcaaatttcaggcactgaggcttatctgtcatcacctgaatttaaacttaatattgttggaacatattattgttctcgtgccaattcaggctcgttcagaaatatatttgtttcaagagatacaatatttgctataacgaaggatgcttttaaaaagtcaaaaatagatattaatgacaacgacaacgatatagcaaaatggtggaacaccccctctttacacagctatatggtggttgcagatgattatgacaacatttccacagtgtttaaagaagtgtcgggaatgggatgtgatatagccaattctccggaatggttgatgagtgacagcacaatattacttgcaaatttgttcggtaagattggtatgttttttatagttgctatttttgttattgctgtaatcataatgatacagtcagctgttacagaaacaaagagaagaaaagaatttatcggtcttttaaaagctatgggatataaaaacaaacagatttttgcctgcctaagtcttgaacaattttatataatcttaacttcatttgtgattggaaatgtaatctctactgctattgtagcaactacaaattatatctttatgcatggctcatatgcacagatggtttatgtaattgattggaatatattttttgtatttatggctattgctttggtaatatcgattttgataccaattatttgtttggtagtaatgttgtgtatgcttaataaaattcagcctagagaagcaatgaactgaaagaggtgacattatgagagctattgaacttaaaaatgtatcaaagatttataaaaacggtgttaaagctcttgccggtgtatctcttacagttaaacaaggtgaatttattgcagttatgggacaatcaggcagtggcaaaagtaccttgctgcaaatagcaggactgcttgatgattgcacatcgggacaaataattataaatggaaatgatgtgtcaagacttaacaaaaatgtgcttgccgatataagaatgaaatccttgggttttgtgtttcagtcatttcatctcgatacacatctcaaggcatatgaaaacattatggtaccaatgctgataaatgctgaatacaaaaataaatctgcaatgaaggaaagagcaatacagcttgccgaaactgtgggtttgacaaaccgtatcgaacattatccgggtgagctttcaggcggtgagcagcagagggtggctatagccagagctttagctaataatcctgattttattcttgcagatgagcctacgggtaatcttgacagcaaaaatgaaattatcatatttgaggaacttaaacggctttcaatatcaggcaagggagtgcttgttgtgagtcacaacgatgctgttaaagattatgcggacagagtattaactatgaaggacggaatattggagcatacagatgaaaaataagaacctcaatatgcctttaaaaacatccatattttcaaatagtttttatttgtgatttactgtacttttgctgtgatttcaactgttcttattctcgttaccataagcattatattacctttaagttcgaacacaagcggtaagatcggcaaccatgtttcaaatagaaaagcaattattgaaaaagtaaaagaggaaaccgtaactacggtacttgtgaatgaaaactggttttcggattataagactgaaattaacggcgaaaatatttcgtccaataacatagataacagagataaggttgcaataatcggaagttctcttgctctcaaactgttttttacaacagatgcagtcggtaaaaagatttgcattgacggaaatcaatatacaatttgcggtgtgatatgcgaaaacgaaagtttaataaataagttttctgctgatgacaaacagagagtgtatgttccatatacaacatccgaaaattatggtgacagaacggttgatatgattgtttacgataactcggtatatacgggagcaattgttgagcaaatggatttgccgcagtattattcggttaatctgaatgggaaaaatcaaacgctctcgtcatttgaacatattatataccttgcaatatttatcggatttagcattattgcattgaagttgtggtataggttcagtagaaaattttttgaggagataaaagaaaatctcaaattaaactactttctgaaatcgctaaaaagtattccgctaaaatatgttgcacttgtgcttgtttttgcaggaatacctgccgtgcttttgattgtatttaatatttgtgatttcagcatttttatcccctcaaaatatataccgaatgataacattttcgacatttcaaattacctgaatgtgcttgtcgataatgcacaaacactaaactcacaaagcctaacaggaaatcaaatgcttgtaaatctgttctcaagaacatttacagcgtcactgtggctgacaataatatttttgattagtattataaccgtgcttttaaatttgacagaattaaaacttcataaacataaaaacaccgacaagcagtaa

SEQ ID NO: 83 - DNA, 6127 bp, unidentified
  source 1..6127: mol_type = unassigned DNA
  misc_difference 5331: note = a, c, g, or t
  misc_difference 5332: note = a, c, g, or t
  misc_difference 5333: note = a, c, g, or t
  misc_difference 5334: note = a, c, g, or t
  misc_difference 5335: note = a, c, g, or t
  misc_difference 5336: note = a, c, g, or t
  misc_difference 5337: note = a, c, g, or t
  misc_difference 5338: note = a, c, g, or t
  misc_difference 5339: note = a, c, g, or t
  misc_difference 5340: note = a, c, g, or t
ttatctttcattcctgtcgatctgcagatttttataatattgcattggagtaacaccatactctttcttaaatgccctgaaaaaatgattgtatccgccaaatcctccaagttcataaacctcacggatactttttccctgctctatatagtgtctgcacagatccagtctgctctttacaatatatgaatgtggcgtttcgcctgtcatcttcttgaattctctcacaatatgatagcggcttacataaaactcgttttccaggcgctccaatgatatatcttctgtcaggtgttctcttatatatatgaaaatatcatccattacaacatgctttttcttatttaattttagctgtacgtcctccttgacagacgaccgcaacgcaagtaccagaagcattgtcagcaggcttttctcatacaatgtgtgtgcaaatttaggagattccttaagcattgaatacagctttttggaaatattctttataagcatggcagattcactctcagaatgaactgtcttaacctgaaagggaacgatatcaaatgcctcgtcaagtcttgtattttcatctgataagctctgcaataactctgttcccacatagagcacatatagttctaacggatatttgtttcttcgatattcaatcttcactttattgccaggcttaataaatattaagtcctccatggtacagaccgccttttcattttcctgacgtaaatatcccataccacctgtcacaaaaataattgtatggtttttcttctgtccaaaactgcgctgtccgctatcttctatttttatatattccatctcataactctgttttttcatatgttaattttgcacattccagcatccatatttttgttcattttgtcaatttatacaatacatcaattttccatagtttgcaagcaatttttgtatatgtttatctctctaatccccatataatgaacatgtagctaccaaaacaacacaaaaatgagaggtattattatgaaagaaacaagaccattttccatgaaggacaaaatcggttacactcttggcgatttgggatgttgctgtacagaacagttccgagccatgtatcttgctattttttataccctggtgctgaaggtcaacccggtgcacgtaggaatccttatgcttatcacaaagctatgggatgccataaacgatcctttaatcggtgcactcgttgacagtcaccagaacaagggtaagggtaaattcattccgtggattaaattctttgcttttccaaccgcagtcctttgtatcttaggcttcgtcaacgtaagtaattttgcttatggtgcccgtcttgcttacatgttcatcacatatgttgtatatgaaattatgtacacatgtgtaagcgtaccatttggaagtctttcaagtgttatgacagatgatgtaaaccaacggaccgacctttcacgcttcagaagtcttggcggcacaatctttatgaccgtcatcgttattgccggtccattattcttatacaaagacaaccagcctgtaccaagccacttccttattatggcagccatctgtgctgttatcggtttcatctgccttatgtttacatcacactggtgcaaggagcgtattatcaccgagccagttgccaaagaaaaagagaagcttaactatttagacgtgctgaaagccatctccaaaaacaaagctttacttggtgttatgttatccagctttattggtatcgttggtgccggtatggtaaacggcttaaatacctacttattccgtgactatttcggaaatgtcgccattatggcagtttcaggcatgttaagcgttatctggtcgcttatcgcattcattgggacaaaatttgttgcaaagaaatttggaaagaaagaatggattatgtatagtgcaactttctcagttgttgtttatgctattttattctttttccctcttgagaacccaatgctctttattattatcaacggaatctgttatcttggtgtcagcggtttccaggtattagtctgggcccttgtaaatgacgcaattgactatcaggaacttcagaccggaaaacgtaacgaaggtatcgtgtactctgcatatacatttttccgtaagcttgctaatgccgtatccggaagtatgagcagctttgcacttgcaatcgcaggctttaacgtaaatgaggccgttcagagcgaagcattctccggacgtctctggaaaacatataccggattatatgtagccgggtacttattagctgtacttgtattaaagtttgtataccctcttacaaaagagaaaacagctgaaatgttacagaatttatcagacaaacgaaatgctgcaaacgcagaataacttcagaaaccgaggtatcttgcattgacaaaacaagttgaaataacaaaccgctcaggtcatgtcttacgcggaattgtaaatattccggatgaaggctcgcgcttccccgccatcattaacgtacacggatttaccggaaataaaagcggatacaaaaatatctatacccacacagccagatttctggctgaaaacggatttgccagcgtccgctttgatttatacggaaatggcgaaagcgacggtgagttcgaggacatgacattcaccggtatcttacatgatatcgaagatattataaactggacaaaacagcaggattttgccaatcctgataaaattattttatcaggccagagcatgggcggctatgcagctgccactgctgcgcctatcgttaatccacatgctctcatactcatgtgcccgggagccggcatgtggtttggatgtaaagaccgcgccgaggcaatggaagcacagggaatcacaaaagcagatatagaggggctttgcttccctacttcttttaaccatgatttatatcagtatgaaccgttttcatccgcagcgggatatacaggtgctgttcttcttatcagaggaacggcagacgatctggtagatgatgctacctgtcatcgatatgaagcactctataatggcaaatgcagttacaaaacaattgaaggcgcaaatcacaactttgcaagcggttctgcaagagctgaattagacaggctcatattagagtttttaacaccattgaaataagataatcactttgaaaggatgtgtgcacaatgaaattattagagcccattaaagttggaaacattgaatttaaaaaccgtattatgtttcccccacttacaacaggatacgaagaaaaagatggatctatcggcgaacagagttttcgtttctatgagcgccttgcaaaaggtggtgttggatacattgtcattggagacgttgctcctctttcaacattctctcctacaccaaaactttactctcctcaacaggcagaaggcttccagcggcttgccgatgcatgtcataaatacggtgcaaagcttggaatccagctgttccatccagactataacgtcgcagctttaaacgaaatgtttcaccagggaaaaatgcaggaggcaagagccaaacttcaccatgatatgcagcactttgtaaatgaagtaactgcggaagaactggatgaaattattaagcacatggaaaattgtgctgttttagcccacaaagcaggcgttgactgtatcgaagtacatggagaccgccttgtcggatcgctctgctctcctattttaaatcacagaacagatgaatatggcggagaccttgcaaaccgtacacgtttcgccttaactcttgtacggcgtttaaaagcaattgtcccagatatggttatcgactacaagcttccaatcgtaactcctcttggagataacggctttcggggaaaaggtggtcttccacttgatgaggcctgcatttttgcaaaagaattagaagctgccggtgttgacacattgcatgtcgcgcaggctaaccacaccggaaatatgggggataccattcctgctatggggacacagccatatggttttatggtttcatactctaaaaaaatcaaggaactcgtttccattcccgtatccgtggttggtcgtattgtaacaccggaagctgctgaagccgttattacaaatggctctgctgacatcgttgcactcgggcgttcactgcttaccgatcctgattttgcaaacaagtgtgccgatggacactgctgcgatgtcagaacatgtatgatgtgtaataaaggatgtacagacaatatccaaaaccgtgcattcctaagctgtgtattaaatgccgagaatggttatgagacaagccgtcagattactcctgcagtcacagcaaagcgaattgcaattatcggtgcaggaattgcaggacttgaagcagcacgtgtcgccgctctgagaggccatcaggtaactatatttgaaaagtcactccagatcggtggtcagcttcttattgccagcgttccaccccgaaaagaagaaatgatgagaagcattaactactatcttaacgtgcttcccgaattatcagtgacattccgtctgggtcaggaatttaccggaaaagactatgattcgtttgatgaagtaattgttgcaacaggtgcaacgaatgcaatcattcccgttccgggcaaagatcttccaatcgttacaagtgcatgggatattcttgctaaaaaagaaattgtattcggcaacgtatctgtcatcggcggtggtcttgtaggtgttgaaactgcggaataccttgctgcccgcggatgtaacgttacaattattgaaatgatggatcagattgcaaaggaagaaagcagcacgattctcccaactttgatgagtgaattagagcattccaatgtccagatccttacctctgcaaaactatcagagatcaatgaccatgcagttattgttgagaaaacagaaaatgaaaaaacctcggtcttagagatcagatcggatttcgttgtaatggctgttggtgcaagaaagaatcttccggatctttcggcttgtccgctcccgcttcattatattggcgattgtgccggagagcgtccgagcaatatcgatcatgccattaaatcagcatatgatgccgcatgtgaaatataaaaggttttttccctattcgtacccagtatatattcacattcgcagaatatctgcagacatgaaattacgggcgtgtcagtttctgacacgcccgctttcattctcatcttatcatttgtattcttgccgcagtcttcctacaaccggaaatgctccatgctgtctgcaagcactttcatgtcgccctccagcttctcgnnnnnnnnnnttccgctggagcgctccaccgttccctccagctcagttgtcatactggaagtctcctccgtggatgccgcattatctgtcgcaagatgcgtcagcacctcgatgctctgggtaactttctcacgctcctcattcgcagtgcggatcatatccgtcaccacgcggatggaattcgtgcacgcctccagtgccttctgcatatccagaaacatctcgctggtatgattcagcgcctctacctgctgcttcgacgcatcattcatctgtaccataatgcccatcgacttctcggaattctctgtcagctctccgataatgtcgttaatctcatgcgctgtatctgccgactgtgtcgcaagacttccgatctcttccgcaactaccgcaaatccgcgtccggcttctcccgcgcgcgccgcctcgatcgaagcattcagtgaaagcagattcgtctgatctgcgatctcactgatcagcgtcgccgccttgctgatcttattgacggatgcattggtactctccgtctgtgtatacatcgactcgatatccgcctctgtcttattgttcgtatcgatcaattcacgaagcttagcgagcgacttatcggaatactcctgcatctgattggcattgccgaccagttcttccatctcgctggagatcttctcgatgccttccgcgatcgtcatgataccgttggacgcttccgtcgtggatcctgcctgcgtcgtgctgttttccgcaatctcattgacggcaaccgcaacgtttccgatggactcctgcat

SEQ ID NO: 84 - DNA, 17866 bp, unidentified
  source 1..17866: mol_type = unassigned DNA
  misc_difference 6943: note = a, c, g, or t
  misc_difference 6944: note = a, c, g, or t
  misc_difference 6945: note = a, c, g, or t
  misc_difference 6946: note = a, c, g, or t
  misc_difference 6947: note = a, c, g, or t
  misc_difference 6948: note = a, c, g, or t
  misc_difference 6949: note = a, c, g, or t
  misc_difference 6950: note = a, c, g, or t
  misc_difference 6951: note = a, c, g, or t
  misc_difference 6952: note = a, c, g, or t
  misc_difference 6953: note = a, c, g, or t
  misc_difference 6954: note = a, c, g, or t
  misc_difference 6955: note = a, c, g, or t
  misc_difference 6956: note = a, c, g, or t
  misc_difference 6957: note = a, c, g, or t
  misc_difference 6958: note = a, c, g, or t
  misc_difference 6959: note = a, c, g, or t
  misc_difference 6960: note = a, c, g, or t
  misc_difference 6961: note = a, c, g, or t
  misc_difference 6962: note = a, c, g, or t
  misc_difference 6963: note = a, c, g, or t
  misc_difference 6964: note = a, c, g, or t
  misc_difference 6965: note = a, c, g, or t
  misc_difference 6966: note = a, c, g, or t
  misc_difference 6967: note = a, c, g, or t
  misc_difference 6968: note = a, c, g, or t
  misc_difference 6969: note = a, c, g, or t
  misc_difference 6970: note = a, c, g, or t
  misc_difference 6971: note = a, c, g, or t
  misc_difference 6972: note = a, c, g, or t
  misc_difference 6973: note = a, c, g, or t
  misc_difference 6974: note = a, c, g, or t
  misc_difference 6975: note = a, c, g, or t
  misc_difference 6976: note = a, c, g, or t
  misc_difference 6977: note = a, c, g, or t
  misc_difference 6978: note = a, c, g, or t
  misc_difference 6979: note = a, c, g, or t
  misc_difference 6980: note = a, c, g, or t
  misc_difference 6981: note = a, c, g, or t
  misc_difference 6982: note = a, c, g, or t
  misc_difference 6983: note = a, c, g, or t
  misc_difference 6984: note = a, c, g, or t
  misc_difference 6985: note = a, c, g, or t
  misc_difference 6986: note = a, c, g, or t
  misc_difference 6987: note = a, c, g, or t
  misc_difference 6988: note = a, c, g, or t
  misc_difference 6989: note = a, c, g, or t
  misc_difference 6990: note = a, c, g, or t
  misc_difference 6991: note = a, c, g, or t
  misc_difference 6992: note = a, c, g, or t
  misc_difference 6993: note = a, c, g, or t
  misc_difference 6994: note = a, c, g, or t
  misc_difference 6995: note = a, c, g, or t
  misc_difference 6996: note = a, c, g, or t
  misc_difference 6997: note = a, c, g, or t
  misc_difference 6998: note = a, c, g, or t
  misc_difference 6999: note = a, c, g, or t
  misc_difference 7000: note = a, c, g, or t
  misc_difference 7001: note = a, c, g, or t
  misc_difference 7002: note = a, c, g, or t
  misc_difference 7003: note = a, c, g, or t
  misc_difference 7004: note = a, c, g, or t
  misc_difference 7005: note = a, c, g, or t
  misc_difference 7006: note = a, c, g, or t
  misc_difference 7007: note = a, c, g, or t
  misc_difference 7008: note = a, c, g, or t
  misc_difference 7009: note = a, c, g, or t
  misc_difference 7010: note = a, c, g, or t
  misc_difference 7011: note = a, c, g, or t
  misc_difference 7012: note = a, c, g, or t
  misc_difference 7013: note = a, c, g, or t
  misc_difference 7014: note = a, c, g, or t
  misc_difference 7015: note = a, c, g, or t
  misc_difference 7016: note = a, c, g, or t
  misc_difference 7017: note = a, c, g, or t
  misc_difference 7018: note = a, c, g, or t
  misc_difference 7019: note = a, c, g, or t
  misc_difference 7020: note = a, c, g, or t
  misc_difference 7021: note = a, c, g, or t
  misc_difference 7022: note = a, c, g, or t
  misc_difference 7023: note = a, c, g, or t
  misc_difference 7024: note = a, c, g, or t
  misc_difference 7025: note = a, c, g, or t
  misc_difference 7026: note = a, c, g, or t
  misc_difference 7027: note = a, c, g, or t
  misc_difference 7028: note = a, c, g, or t
  misc_difference 7029: note = a, c, g, or t
  misc_difference 7030: note = a, c, g, or t
  misc_difference 7031: note = a, c, g, or t
  misc_difference 7032: note = a, c, g, or t
  misc_difference 7033: note = a, c, g, or t
  misc_difference 7034: note = a, c, g, or t
  misc_difference 7035: note = a, c, g, or t
  misc_difference 7036: note = a, c, g, or t
  misc_difference 7037: note = a, c, g, or t
  misc_difference 7038: note = a, c, g, or t
  misc_difference 7039: note = a, c, g, or t
  misc_difference 7040: note = a, c, g, or t
  misc_difference 7041: note = a, c, g, or t
  misc_difference 7042: note = a, c, g, or t
atgttcaacaaacaccctaaaggtctgattgccgcatcctttgctaatttgggcgagcgtttcggcttttataccatgatggccattcttgtactttttctgcaagccaagttcggactggatggaaaagaggcaggtttgatctactcaacattttatttttctatttacattcttgcattgataggtggtattattgccgacagaacccgtaattacaaaggtaccatctttgccggtattgttttgatggcggtaggctacttgatgcttgccatcccgtctcctacaccggttgccaataaaaccttgtttttggtgattacttgtgcggccttgtttgtcattgctttcggaaatggtcttttcaagggaaatcttcaagcgctggtagggcagatgtacgacaatccccaatattccagcatgcgtgattctggtttctccttattctatatgttcatcaatgtaggtgccatctttgctccgtttgccgcagtaggcgtacgtaactggtggctgtccacattcggctacaattatgatgccgacctgcctgccctttgccacggacatctggcaggaacgctgactcccgaagctgtggacacttatagtgcactggcaacgaaagccactatttccggaacacccgtaacggatatgacggtatttgccaatgaatatctgaacgtgtttaccaccggtttccattatgcattcggtgtagctatcttggctatggttctttctttggtaattttcgtcattaacagaaagaaattccccgatcccagcaagaaggtggctgcaaaagcgggcgatgccactgcagtggagatgagcgcacaagaggtaagacagcgcatgtatgcattgtttgccgtattcggtgtggtaattttcttctggttctcgttccatcagaatgggttgacactgacgtattttgccaaggaatatacagatttgaatttgttcggcatggctatttccgctgagctgttccagtctttgaacccgattttcgttgtatctctgacaccggtcatcatggctgtctttgcagcacagcgtgccaagggtaaagagccttccactccgcggaagattgccatcggtatgggtattgctgccaccggcttccttataatggctatcggttcttatgtaagcaacttgccgatgcacaaggatattatcgctttgggtacctctccggtgaaggtgactccgctgttgctgatggttacctatctgatattgactgttgccgagttgtacatttctccgttgggcatttcattcgtatccaaggtggctcctcccaaatatcagggtatcatgcagggcggttggctcggtgctactgccattggtaatcagttgctcgttatcggtgctatcctctacgaaagtattcctatctggatgacgtggacggtatttgtagtagcgtgctgcatttccatgttcaccatgctgttcatgctgaaatggcttgaaaaggtggcgaagtaatcggaaacgaaagataaaactaaaggctgcgcaatgttcgtaatgaactgcgcagcctttagtttttggagggcttttaatgccgggactcagatttccagtcccatgatgtagtcattcatgtaatatccgtttcctatcgggaaatccccttcacggagttttcgcattcccatatgttcgtaaaactgcagtgccttgttggtgcggtttacattcaattccatcagacaagggccgggatgtacttccttgatgtacttgatggcttctcgaaagaggaaactgccgcaatgtgcaccctggtaataggggagcacataaatcttttgcaggtggaataaatcttctccttgctgctgtacggacacatagcccgccgcttcacattcttcgtaggccaggaagtagacgtggccttcctcttccatttgcttgcggatattgtccaatgaatacatccattccatcatgtagtcggtctgttcgggagtaaggatatccttatacgtgacggggaatatttgctgcgcaagtttctgaatcagtgcgcagtctgctgtcgttgcttttcttatggtaaacatatcggttgtatttatactgtttggggtgtaaagttaagccttttttgtgaaacaatcgttatctttgcagaccgttaccgaactaactaattctgattttaaaaattatggcatttacgagcaacattatgattgtccgccacagattgctgaaggaactggtaaagctgtggaataacaacgaacttgtggataaaatagaccggctgcctatcgagctgagtccgaagaggtccaagcacgcgggacgctgctgtgtgcacaaagagcgcgcggtgtggaagtacaagtcattgccgcttctgggactcgatatggaggacgagacggatgagctgacccccttgtcggagtacgctgcccgtgcactggacagagcggaaaatggcaggccgaaagacaacatcatgtgtgtgattgacgaagcttgttcggcatgtgtgcagattaactacgagattacgaacctctgccgcggatgtacggcacgcagttgccaggtgaattgtcccaagaaggcagtgcacgtcaaggagagcgggcaggcatggattgaccatgatgcgtgtatcagttgcggcatctgccataagagttgtccctaccatgccattgtttatattcccgtaccttgtgaggaggcttgtcccgtgaaagccatcagtaaggatgagaaggggatagagcatattgacgaaagcaaatgtatctattgcggaaagtgtctcaatgcatgtccattcggagcaattttcgaaatatcgcaggtgttcgacgtgttgcacagaatccgcaagggtgagcaggtggtggctatcgtggctccgtccatcctggggcagttcaagacgactattgaacaagtatatggcgcattgaaacaagtcggttttacggatatcatcgaggtggctcagggagcgatggataccgtcagcaacgaggcgcacgaactgattgagaagctggaggagggtcagaagtttatgacgacttcctgctgtccgtcttatatagagctggtgaacaagcatattcctgccatgaagccttacgtgtctggcaccggttcgccgatgtactatgccgcacgcattgccaaggagaagtatccggatgcaaaggtggtctttatcggtccttgcgttgccaagcgcaaagaggcgcagcgcgacgaggcggtggactttatcatgactttcgaggaggtggcttccgtgcttgccgggctggatattcagatggagcaggcaaagccctattccatgagtttcacttccgtgcgcgaggcgcatggttttgcgcaggcaggaggcgtgatgggtgccgtgaaagcctatctgaaggaagaggcagataaaatcaatgccgtacaagtggctaatctggataagaaggctatcggtgcgttgcgtgcttacgccaagtcgggcaaggctccggggcaatttattgaagtgatggcttgcgagggcggttgtattaccgggccatgttcgcataatgaaataactgccggaaagcgccagctgacgcaggagttggcaaagagaaaagagacgtattagccctttgtccgtttatatgaagcatttgattgacaaactgcggagcaatcgcaggctggatgccgaagagtataaagccttgcttctttgccgggacacaaaacttgcagcctacctgcaggatcttgcccgggaagaagcgcttgcccgctttggcaataaaatcttcattcgtggactgattgagataaccaaccgttgccgcaataactgctactattgcggcatacggaaggagaaccggaacataacccgttatgagctggcgcaggaggagattctttcgtgttgccatgaaggctatcggttgggcttccgtacctttgtgctgcaagggggcgaagcgccggcggtgaaggatgaggggatggtggagacagttgccgccatccggcaatccttcccggattgtgccattaccttatctttgggcgaaaaatcgcgggaagcctacgaacgtttcttcctggcaggtgccaaccgctatctgttgcggcacgaaacctgcaacgaagggtattatcaccggcttcatcctgctgagatgtccctttcccatcggttgcaatgcttggactggctgaaagagataggctatcaagtgggaaccggaatcatggtaggcagtccttaccagacggtggaccatctggtagaagatattctcttcatcgaacggtttcagccggagatgataggcatgggaccttttcttccgcatcacgatactccgtttgcctcttttccgccgggagatatggagttgacgctgaagttgctttctatcttccggctgatgcatcccgcggcactgatacctgctaccactgccctggccacacttgctccggacggacgggaacggggaatattggctggcgccaatgtcgtgatgcctaatctttcgccttctcatcagcggacgaagtactccctttatgataacaaagcttctgcgggtgccgaagcggcagaaggtttgcaaaaattggaggaacaactgaaagggataggctacgaggtatcaaaagagagaggagattatgagaatggagaattgaccgttgataattgataattttcaaatcttcattctttattttaattaccaattgtcaatttacgaagtgtataacataaagtcaagacaagcagaagaattcatcaatcaccaggagatattggatacattggagtatgcgcaggtaaaccgcaacaaccgtccgctcatcgaaagtttgattgacaaggctgctttgtgccagggactttcccatcgggaggcggccctgctgctggaatgtgacgagctggaactggtgcagcgcatctatcatctggcacgtgaaatcaaacggaaattctatggcaaccgcattgtgatgtttgccccgctttacctttccaactattgcgtgaacggttgcgtctattgcccgtatcatgccaagaaccgtaccatcccccgcaagaaactctcgcaagaggagatacgccgcgaggttatcgccttgcaggacatgggacataaacgcctggcgctggaagccggagaagaccctcgaaacaaccctatcgactatatcttagagtccattcgcaccatctacagcatccaccacaagaacggggccatccgccgggtgaatgtcaacatagccgccactacagtggaaaactatcggttgctgaaagaggcaggcatcggcacttatatcctttttcaggagacttacagcaaagagcattacgaagccttgcatcccacgggaccaaaaagtaattatgcctaccacaccgaagcgatggaccgcgctatggagggtggcatcgacgatgtaggtatcggtgtattgtttggtctgaatacctatcgctacgacttcgtaggattgctgatgcatgccgaacatctggaagctacctttggcgtgggtccgcataccatcagcgtgccgcgcatctgtccggcagatgatatttcgaccgaggattttcccgatgccatctcggatgagatgttctgccgtattgtggcggttacccgcattgcggtgccttatacgggaatgattatttccacccgtgagtcggaagccgtacgccgtcgggtgctcgaactgggcgtttcgcagataagcggcggttcgcgcaccagcgtgggaggctatgccgtgccggaagccaaagaggaagattcctcccaattcgatgtgagcgaccggcgcacgctggatgaagtggtgagttggctgctcgacctggggcatatccccagcttctgcaccgcctgctatcgcgagggacgtaccggagaccgcttcatgtcgctcgtcaagcgcggacagatagcaaactgctgccagcccaatgcactgatgacattaaaagaatatctggaggactatgcctcctccgaaaccaaggagaagggcatacagctgattcgtgaggagatggagcatatcccgaaccccaagatacgggcgatagccgaacgtaatcttcaggagataggggaggggaaaagagactttagattttagatttcggatttatgaataatacacctcgttccaaccgcctgcacattgccgtctttggacgacggaacagcggaaagtccagccttgtcaatgccttgaccgggcaagacacggcattggtatccgcaacgcccggcactactaccgaccccgtgaccaaagccatggaagtatatcctttgggcccgtgcctctttatcgatacccccggttttgatgacgacgaaggcgaactgggcggtatgcgcgtggagcgtaccttaaagacggtggagaaagcagacatcgccctcttgctttatgaagctgacggaacgctggaacagcaatggctaaagctgctggcagcgcgcgaaatccccgtgatactgatactgaataaagccgattcccgtcaagacaccgcttccgtggttcttcggattgaaaaggagtgcgggcaggctcccgttgtggtcagtgccaaagagggtaccggcattcaaggtatcttcgatgctatcctcgaaaagcttcccgagaattttggtgagcagactatcacgggcgatttggtgcgtgaaggagatgtcgtcctgctggtgatgccccaggatatacaagcccccaaaggtcgtctcattcttccgcaagtgcagaccatccgcgaactgttggataaaaagtgcttagtgatgagctgcaccaccgacaagctgcaagcctccctgcaagcccttgnnnnnnnnnnnnnnnnnnnnnnnnnnnnnnnnnnnnnnnnnnnnnnnnnnnnnnnnnnnnnnnnnnnnnnnnnnnnnnnnnnnnnnnnnnnnnnnnnnnntgcttagtgatgagctgcaccaccgacaagctgcaagcctccctgcaagcccttgcccgtccgcctaagctgataatcaccgattcacaagtattccccatcgtctatcaacaaaagcctgccgaaagtagtcttacttccttctcggttctttttgccggctacaaaggagatatcaatgccttcgtggagggagctgccgctatccatagcctgacactccaatcgcgtgtactgatagccgaagcttgcacccatgctccgctgaccgaggacatcggcaccatcaaaattccccgcctgctacgaaagcgcatcggcgaggaattgcagatagactttgtatctggaaatgactttcccaaagacttgtcccgatatgatttaattatccattgcggcgcttgcatgttcaaccggaagtacgttctcaatcgtatagcccatgcccgcgcacagcacatccccataaccaactacggagtagcaattgcgagtctgaccggtatattggataaaattgttatctatcggtaaatatccctctccctctctgttcacgttactgatgttatagagtagtgtgaactacttttcttgttaacgatgcttaatataaggtactttgtaatacaaggtactgatataatacatatatttgtgtcatacaaggaacaacaatagaatgaatgagaacactcattactctattgcgcagcaaaatagtaaatcgtaaattgtcaaatagtaaataccattatggatgtaaacaatgtaaagtcgcaaatgcgcaagggcatgcttgaatattgcatcatgttgctgcttcacaaggagccggcttacgcttcggatatcattcagaagttgaaagaagccagactgattgtagtggaaggtacactttatccgttgctcacccgtctgaagaacgacgacttgctgggttatgaatggattgagtctacgcaaggtcctccccgtaagtattaccggttgacggaaaaaggagaagtctttctcggtgaactggaaatgtcctggaaagagttgaacgagacggtgaatcacatcagcaattcttgaaatgaccacagagaatatgctgcattcgccgaatggtaaatagtaaatcgtaaatagtcaaattgtaaataaatagtgtgttatgaaaaagacattaactgtaaatttaggtggaaccgtttttaatattgatgatgacgcataccgccttttggataattatctgagtaatctcaagatacacttccgtaaggaagccggtgccgacgagattgtagatgatatagaacgccgcatttccgaactctttgccgagaaattgtcggccggttcacaagtaatcacgattgccgatgtggaagaggtgattgcccgcatgggaaagccggaggacatggagacggaaggagagagcagcagtgccgatgccggtagtacaaatgccggaggtggttatggtgccggtgcatggagcagcaataccgcttatagcactacacgccgccgtctctaccgcaatcctgatgacaagatgctgggtggtgtcatcagtggaatggctgcctacctgggatgggatgtaactttacttcgactgttactgcttgtcatcttgatttgtggggtagggacattgataccggtctatattgtgtgttggctggttataccggaagcccgcacagcagccgagaagttgagtatgcgtggcgaggccgttacggtggagaatatcggaaagacggtgacggacggttttgagaaggttgccaatggggtgaatgattatatgaggtcggacaaaccccgtactttcttgcagaagttgggagatgcattggtgatgattgtcggctggttcttgaaaatctgtctggtgatatttgccattatctgcagtccggtattgtttgtatttggagtggtatttgtggcgttgttgtttgctgcgatagcggtggctgttggtggcggtgcggctctcatttcctttttcccgatggctgatgtggtactgcctacttctccgttgtctgctattgtgatgtacattgcaggaatcttgctggtaggaattcctttggtcagtcttgtatgggccatcttcagtcagatattcaaatggcagccgatgaattccggtttgaagtggacgctggttatcctttggattgtaagtgcggcttgcttcggaatctgttttgcagtgcaaggggctactttcccggaattgggtatatttaacttctgagaatagtaatttcttttttaattgatatcgtgtttgtaggaatctgatttctataaacacgatattttttatttcaatgtaattatttgttatacagtggaatatttcgtttggaaaaggtgttttttaaacgttcgtttaatgaacgcaaagataacgtgtatttttgaatctcgcaaaatgtttaataaaaatattctataaatttctttttagtgagtataatactttgtcagtaagcctattgcattgtatttctctaacttcttccttttactaatttttaagtaatcttccctctttaattttcttaaatattgacgttcaaaaaacgaacgtctattgaacgctttttgcttgcaatagattcgtttacagcattttacctgttaggtaatgaatgactgcaaaaaatctgttgacaagaagggcgtaaagcttgtcgtattctacataaagtgcccgcaagtaattgaatttcaggtgtatgtaagagattcaaagccccaggagaacacccttgtctgaacaaaagcataaaaatgggaatagagaaagaggtcgaaatctggtatgctatgcgtgccacctaccgcagagaaccggatgccatgcatctgctcaagaaagagaatttgggctgtttcattcctatgcaatacaagatatgtataaaaaaagggaaaaaagtccgtgctctggttccggtcgttcataatctgctttttgtccatgcccgtccttccgatgtgcagcgtgtaaaatctcaagtcacttatctgcaatatatcaccgatacccgcagtgggcagaagattattgtccccgacagtcagatgcagcgtttcattgccgtatccggcacttacgatgaccatcttctttattttcaaccggatgaattgaacttgtccaaaggtaccaaagtccggattaccggcggtgaatttgaggggcaagagggtgtgtttctgaaggtgaaaggcgcacgtgaccgtcgcgtggttatcgaaatacaaggtgtcatagctgttgccatggccactatccatcccgatcttatagaagtaatcggctgaactttaatttttaattcttaattctataattgcttatgtctctttccgaagaagcaatcactcttcagcgtgctgcgcacgaactgatgtatttgggtatggacggcagtcccgtctatagcgatgacttgtcacggcggaacggtgaggtctaccgtcttaccatggctttgtaccggtcgggtgtaaaaggcactaccatcgaagagcaggcaaatgtctgtcttgcccttcttatgggttacagcgcctcttttgtggaccatggcgaaaagcagcagcatgtccaggaagtgctggactgttgttgggatgtgctcgacgcccttcccgcttccttactgaagctccgtctgcttactgcctgctacggtgaagtgttcgacgagtctttggccgacgaaggccgttccatcatcgcctcctgggattccttatcacttactcccgaacagcaggaagcggttgatgaatttcagaatgtgacagacaatccctatccatgggaatatatcgatgaataaaacttttcattataatgcttaacaataaatccgtattgattaccggaggaacgggttccttcggaaagaagtttgtggaaaccattctccgtgattatccgcaagtaaagaaaattattatttactcccgcgatgagctgaagcaatttgagctgaaacagaaatatcccggtcataagtatccgcaactgcgtttctttatcggtgatgtccgtgacctcgaacgcctgacgcgggcttgcgaaggagtggacgtgattatccatgcagccgccatcaagcaggtggataccgctgaatacaatcccgaagagtgcatcaaaaccaatgtacacggtgcgcagaatgtgataaaggctgctcttgccaccggtgtacagcatgtggtggccctttctaccgacaaggcttgtgcccccatcaatctttatggcgccaccaagctcacttccgacaagttgtttactgccgccaacaatatcagcggttccaaggacatcaggttctccgtagtccgttatggcaatgtgatgggttcccgcggttccgtaatccctttctttatcaacaagcgtgacaacggggcgaaggaacttcccataaccgatatgcgcatgacccgtttcaacatttcactggaagccggtgtcgctttggtcatgtatgccatcggacatcacctgggtggtgaaatctttattcctaagattccttcctatcatatccaggacgtggctaccgccattgcacccaatctgccgcaggtggaagtgggcatccgtccgggagagaaactgcacgaggagatgattactgtaaccgatgctcttgatacaatcgatttgggcagatattatgtcattcttccttccgtatctttcaagcacagtcgcgaagagttcatcagacatcacaatgcagtatccgttcccgacggtttccactacagcagtgacaacaatacggagtgggagacagtagagactatgcgcgagaatataaagaaatacgttgaccctaatttcgaggtgaaatgataagcaagcctattccatacggtcgtcagcatatcacagatgaggatatccgggcagtcatcgataccctgaaaagcgattacttgacacaaggtcccaaaatcagggaatttgaaacgaaatttgccgaatatgtaggtgcacaatatgccgtagcggtgaacaatgccacttcggggcttcatcttgcagctaccgcactgaatgtaaagccgggcgacaaggtgattgtcactcccatgacctttgctgccagtgccaactgcatccgctattgtggcggcgaggtggtattctgtgatattgacaaggatacttacctcatggatatccgtaaactcgaagccatgcttaaagcttctccccgcggtacttacaaaggtattgttccggttgattttgcaggctatcctttggatctggaagagttcagaaagcttgccgacgagtacggcttgtggattatcgaggatgcctgccatgctcccggcggctatttcatggacagtaaaggcaagaaacaacattgtggcaacggttgttttgccgactgtgccgtattctctttccatcccgtgaaacatatcgctacgggtgagggaggcatggtgaccaccaacagcaaggagctctatgacaggctttgtctttaccgtacgcatggcattacgaaagaccctgctttattacacgagcatcatggtggctggtattatgagatgcaggagttagggtataattaccgtctgactgattttcaggctgccttgggtatttctcagctggagcgtgcgaaagcaggtcttgaacgccgccatgaaatcgtgagacgctataatgaagcgttttccggaatagatggcatcaagactccgttcaatgctgccgatgtctatcatgcttatcacctttatatcattcaagtagctgaccgcttgggcctttataattatctgcacgagaacaatgtctatgcgcaggttcattatgctccgcttcatctgatgccttactatcagcagtggggcaataggaaaggcgatttacctatagtagaagagtattacgaacattgtctgagtcttccgatgtatcccacgctgacggacgaggaacaggagtatgtgattgaaaaggttatagaatttgtagcgaaatgaaaaatatagcaatcattcctgcacgtggcggcagtaaacgtattccgcgtaagaatatcaagccctttatgggtaaacctatcattacatattccatagaggcagctttacaaagcggtctttttgaggaggtgatggtttctaccgatgatgaggagattgccggaatagcttgtaagtatggtgccaaagttccttttatgcggagtgccgagatgtcaaatgactatgccggtactgatgatgtaattcttgaagtactgaggaagtataaagagcaaggcagggagtttgaaacggtttgttgcatttactcaacggctccttttgtcactcccgaaagactccgggaagcatacggaaaaatgaattcggagatagattccgttttcacttgtgtggcttattcctatcctatacagcgcagccttcacatcgtggatggaaaaattagtatggtttatcccgaatacaaaaatgcacgttcccaagatttagaaccgatttatcacgatgccggtcagttctatttctctcgcactgctccctttgtggagagccggactttttggggtgagaatacagccgggttggtactttccgaacttgaagtgcaggaccttgatacacagactgactgggcattggcagagatgaagtatgagttgcttcataaatgatgtaatgcagaaaatctatctccgtgccgatgcaagtgctgccatcggctacggtcactttattcgtactctggctttggccgatatgctgaaggacgattttgattgtaccttctttacttgccatcctaccccttatcaggtgagtgagatggagaaggtatgtcctttcatccccttacaggaagaatcgcattatgatgagttcctttcccttttacaaggtgacgaaattgtggtacttgacaactatttctttactactgattaccagcgtgccatcaagcaaaaaggttgctgtctggtgtgtgtggatgatatgcacgacaagcactatgtggctgatcttatagtcaatcagggattgggttacacgcgtgatgactattcgtgtgaaccatatactcaatttgcctttgggcttcaattttcattgttgaggaggcctttcttcaatgttgcgctgcagaataaacggaacaattattcaggaggtttatatgtattggtggcttttggtggttctgatttcttgaatttgacgtatcagaccattcatgcaattaaagccaaagacaatgtgaagaagataacggcaattgtcggtgattcgtatgcagccgagaatatggttgatgaccccaaagtaacctatcagaagaatttgtctgccggttccattgcagacttgtttagtactgtagatgtcgccatattgcctgcctctacgatgatgaatgaggcattggcctgtggaactcctgttataggagggtattatgttgataatcaggagtacgactattatatgtttttgcgtgaagggctgattcagggggtgggtgattataccgatgccgctgcctttactcttgttgctgagaatttggataagatggccattcgtaaaagacatgccatcactccggatattcccaaacggtttgtcaatttgtttaaaagtctgttgatatgcaagtaacttcacaaagagcttcggccatattgtataattatctgtctggcaaccattttgataaaccgttcttattgccggcaaatgtgtgtcctgtagtgcccctgtcgtttatgaaagcaggtgtcggttttgaatttatagacatagatgaaagccatgccatgtcaaccgagaaatgtttgacagctatagaggcgggaaaatattccggtcttgtatttgtgcatgcctacgggaaaaagtatgacaacaaagaattttaccgagcagtgaaaagtctcgatcaaaatctttgtatcattgatgattgttgtttgtgcattcccgaattggtagattccttgcctgaaaatgtggatctctgcctttacagtaccggatatgctaaattcatagaactttcctatggtggctatgcaagttttaggggggtacgaagttgttgattattagtatgatagcattagtgaacaaaagcattcggtatatataaggaaatgtctcctggagaatgtcagatatatgcttccggctgactatccttggctggacgcctcaaatttgcaaatgaccgatgaggaatattttgacatcattgaaagaaagctcccaaaagtgattgcggaaaaagagaaaataaacaagatatacaggaatctgcttcctgaatcgattcagatgggagatgatttccagaactggaggttcatgattgtcatcgagaaccggcagaaggttcttgacgcaatattcaaggccggtctgtttgccgggactaatttcccttcggtttcatacatgttcaaaggtgtttcttctcctgttgcggaagtggaggtgaagcatatcgtcaatttgtttaatgatttctggttcagtgaagcacaggcaagaaagatctgtgatgtgataaattcggttatatgaataaaagattattgatactgggcgcaggtgaaatgcaggttcctgtcatccgaaaggcgaacgatatgggattgcataccatagtcgcagatatggatgcgaatactccgggaatggggtacgcctcggaaccggttcttgtcagcacgatggataaggaaggtgttttggaatgtgccaaacgtcactctgttgacggcatacttactacaagtgacgcgcctgtaaatgtggtttcctatgtcggggaacagctggggcttccgtccatgtccactgaggtcgcaaaaatctgtacaaacaaatacttgcagagggaaatgtttgcggccaacgggattgatgtaccatttttcatgctttgtgataaagatacggacttgggcacattgcaagattatccatatattgtcaaaccggtagattcctctgcaagccgcggagtaaaaaaggttacaaatcataaagaacttgtacttgctttttccgaagctctcggttattcccgtaccggaaaggccattgtcgagggctttataacaggccgtgaattcagtgttgaaacatatacgcaaaacaataaaactaccgttgtcactattacggagaaactttgtatcggtgaggcagaaggcttctttgttgaagatacgcacattgaaccggcgcgtataacgaaacaggagtgggagctggtttcggagaccgtatcaaaagcactttgcctgattggacttaataattgtccctcgcatacagaaataaagctgaatgaatcgggcgcttatatcatagaaattgcttgccggcttggaggagattatataacctctgatttggttccattgtcaaccgggatagatatgctgagaaatctggtgaactgttctcttggtttgcccgttgatgtccttcgcaaacatgaaaaatgctcagcggtacagttccttaatccgctcaactatcagcgttgtgtggattttctaagctcttcccggtcatcggctgtttttcggtctgaaataagaccttattctgaaaaaaaaataaaaaactctttagaccgtttagggtatatcatacttcagactgatagtatggaagagcttgaaagtattctaaggacgattaaatagtaaagacatgagagataagtgtatgattgtggctgagatgtctgccaaccataacggtaagaaagaaacagccattgaaaccgtcagggctgcaaaacgtgccggagccgatgccgtcaagttgcagacctatcgggctgataccattacgcttcgctgtgacaagcctgattttataattaatgaaggctctatatgggacgggcaatatttttatgatttgtatgaacaggcttatactccttgggagtggcatgaagagttgttccatgtggccaaggaagaaggactgatctgtttttcttctccttttgataagacagccgtcgatatgcttgaggctttggactgtcccgtttataagatagcttctttcgaaattacggatattccattgatagaatacgcggcttcgaagcataagccgatggtacttgctacaggcatagccaccgaagaagatattcaattggctgttgaagcttgccgcagaatgggaaataatgatattacggttcttaagtgtacctcttcttatccggctccagttgaggaagccaatctttgtatgattcgtgatttggcagaacgtttccaggtaaaaagtggactttccgaccataccctggggagtgtctctcccattgtggcggttactcaaggtgcgagtatgatagaaaagcactttattttgaatcgttccatcggtggtccggattgttctttttctatggaagagaaagattttgcccaaatggtaaaagatgtgcgcatggctgagttatctttggggaaaacgacttacgaattgacggagaaaatgagaggtagccgttccgcatcacgttctctctatgtggccgaggatatgaaggccggagaagtgattacggagcggaacgttcgctccgtccgtccgggcttcggcctgcaccccaaatatctgaaagatatattgggaaagaacgtgaaccgggatttggagaaagggacgaggtttgcattggagtacgtgaatggttag

SEQ ID NO: 85 - DNA, 5387 bp, unidentified
  source 1..5387: mol_type = unassigned DNA
ttagttcacaccaagatacttggcaacgaccatacgctggacttcggaagtgccctcgtagatctcggtgatcttggcatcgcgcatcatgcgctcaacgggatactcacgggtgtagccatagccgccgaagagctgaacagcgcggcgggtgacgtcggaagcggtctcggccgcgaagagcttggccatggcagcgtccatggagtaatcctcgtgattctgcttcttcatagcggcagcgtaaacgaggtactgggcagcctgagtgcgggtgtgcatgtcggccagctggaactgggtgttctggaactggctcaggcggcgaccaaactggatacgctccttggtgtacttgacagcctcgttgatggcgccttcggcaagaccgagagcctgggaggcgataccgatacggccgccgtcgagggtcttcatggcgatcttgaagccttcgccttccttaccgagcaggttctccttggggacgacgcagtcttcgaagacgaggtcgcaggtagagctgccgcggatacccatcttcttctcgtgcttaccggtggagaagccggggaagtccttctcaacgatgaaggcggtgataccgtggttacccttgctcttgtcggtcatggcgaacacgacgaaagtggaggcaacgttaccgttggtgatgaagcacttgctgccgttgaggacgtagtcgccgttctcgttcttgacagcggtggtctgctggccggaggcgtcggtaccggcgccgggctcggtcagaccgaacgcgccgatcttgcggccggacagaaggtcaggcagatacttcatcttctgctcctcggtgccgttctcgaaaatgggagcgcagcagagggaggtgtgggcggaaacgataacagcggtggtgccgcaaaccttagcgagctcctccacgcacatggcataactgagaacatcgccgccggcgccgccgtactgcttcgggaagtaaatacccatcatgccgagcttggccatcttttcgacggtctccatggggaagcgctcttcctcatcgagttcctcagctaaaggcttgacttcattttctgcaaattcgcgatacattttgcggaccagcagatgttctttggacagatggaaatccatagtcttttgctccttcactataaaaataattggattgtctaatttttcacaaatcagttccgtgacttacattatatcctgtgcgttttattttcgcaagaggaactatcattcctttttggaattcgtgctttttgccgaattcattaaagtctttttgacatttccgttccttttatgacagttttctgtcattttcaggaatcctttccattccaaaagagaaaaagggaggcagtttttgtaaactgcctctcctttttatccttttagggacggattacttcttgctgtaatcgtagaagcccttgccggacttcttgccgagctggccgccgcggaccatcttcttgagcagcagagcgggacgatacttcggatcgccggtctcgctgtagaggacgttcataatggcgaggcacacatcaaggccgatgaagtcgcccagggcgagggggcccatggggtggttcgcgccgagcatcatggccttgtcgatatcctcgacagaggcaacgccggtctcgaccaggccgatggcctcgttgatcatcgggatcaggatcttgttgacgacgaagcccggagcctcagcgacctcgacaggctccttgccgatctccttggagaggttgtagatgaagtcgaaggtctcctgcgtggtgttggcgccgcggatgacctcaacgagcttcatgctgggcacggggttgaagaagtgcatgccgatgacggcgtgcttgaggccgagacccatctcggtgacagacagagaagaggtgttggtcgcgaagacggcgctctccttgcacatctcgtcgagctcgccgaggagctgacgcttggtgtccatgttctccgccacacactcgatgacgaggtcggcgtccgccgcggcagacttctcctcgacgaggatgttgttcaggatggcgtccttggcctcttcggtcatcttgcccttctcgacgcgcttctgcagggaagcggcgagcttatccttgtggcgctgagcggaagcgacgctggaagcgtacatcagagcggtgtggcccttggccgcgaagacctgagcgatgccgctgcccatggtgccggcgccgaaaactgcaactttcattgtgtgtatcctcctacaatataaatagataattctatggaatcacttgttgataaagggctcgtgcttgcgcttttcgaggaaggcgcccatgccctcctgctggtcggcgctctggaagcaggagccgaaggccttctcctcgatcacgacggcgcggtcaatgtcgacctgaagaccgtcgttgatggcctgcttggacgcgcgcaccgcgatgggcgcgttgccagcgatctggccggcgagcttttccgccgcggcgtagaggtcagaaagcggatagaccgcgttgacaaggccgatgcggtaggcctcgtccgccttgatgttgcgggcggtgtagatcatctgcttggccatgccggggccgacgaggcgggcaaggcgctgtgtgccgccaaagcccggcgtgatgccaaggcctgtctcgggctggccgaagacggcggtatcggagcagatgcggaaatcgcagctcatcgcgagctcgcagccgccgccgagggcatagccgcccaccgccgcgatcgtcgggatggggaacgcttcgagcttgcgcatgacgtcgttgccctgcttgccgaaggcctcggcctcctccttgctgagctccttcatctgcgcgatgtccgcgccggcgacaaaggacttctcgcccgcgccgcggacgatcaggcagcggatctcgcttaagtccaccgcgtcgagcgcggcatcgagatcggcgagcacctgagaattgagcgcgttgagcgccttttcgcggtcaatgatgagataggcaatgttgcccttgggttcatatttgacaaaagacatcgtgtgtctcctcctgtcttcttcaactcccccctattatatgggcggcaaggcatatttgcaagagaaaaatcacttttttcaaaaaagtttcacacttttccagtgtcattgcaagaaacgttgcattttaaatgatcttttctcccaatgcagcaactcttgtataaaatttttaaaatgacttgtctcttgcaccaattttcgatatgataggctttaattataggaaaacgaggttcattctatgcgaatgcgcaaaaagaaaaacctgcttccccgcatggagcggtgcggggcgtatcagatcaaggacccctacgagcgcaagggccgctggcacgacttgatgcccgaggcgaaggagatccgcgtggagctcggctgcggcaagggccgcttcaccgtcgagacggcggcggcggagcccgacgtgctgctcatcgcggtcgaaaaggtgcccgacgcgatggtcgtcgcgatggagcgcgcggcgaaggcagagctgcacaacgtcttcttcatcgacatcgacgccaaccagctccctgagatttttgatcagggcgaggtcgaccgcatctatgtcaacttctgcgacccgtggccgcccaagcggcaggccaagcgccggctgacgcacggcaatttcttgaaactctaccgcaaggtgctcaaggacaacggccaaattcatttcaagaccgacaacgacccgctgtttgagtggtcgatcgaggagatcccgcagttcggcttcaccctctctgaggtcacacgcgatctgcacgcgaacggacagcgcggcgtgatgaccgactacgaggccaaattctatgccgagggcaagaacatcaaccgctgcgtcgccacgatgcagccgtgggaagagcccgaggaagaggatgcgcccgaagaggcggacgaaacggctgaataaaaggaaggctttcagccttcctttttgctttcttccagatacggcgaatacatcatcaccgcgtcgttcacggcgacaggcgtctccgcgagcagcttgccctgcaaatcaaacgtctgccggtagagctcgttgtggcggatgtagccgccccagtactgcgcgcgcatctcgtggttgcgctcgacgacctcatagcgctcggtcggctcggcgctcacgcgccactcgccctcaaggtctgttttgccgacgcggacgcgcatctgataggtgtcctgtgtgtcgttgcggatcatcaggtcaagataggggtaaaagcaggtcgcaccgctgccgaagggctgcgtgcggttcgcgtcgggaaagacgtcgtagccgtggcggtggcgctcgacgaccgtgagcggcgtgtgcagcgtcatccagtagatgaggtttgagagctggcagagcccgccgcccgtcgcggccagatacccgccgttgcgcaggatcatgccgggcagataccccttccccgccgtcggctttccgatgagataccagtagctcatcgtttcaccggggcgcagcaaaagcccgtcgagccgcgcacaggcgaggcggagattcgtcaccttgttgcgctggagctgcatgtcgacgtccttgagctttcgcatgagcggtgtatggtgggaaaacgcctgatatgctaagtcttccccgctgcgctcgcgcgcaaaatgcttccgcatcgaaagccatctgagttttcgctgcgcgctaaaatacgcgccgccgagcttcagccgcaaattagagcgttttttcggttcgcggacggtcatatgcttccctcccctgtttttctgcttttatagacgcaaaacggcgggaaaaagttccaacattttcttatttcaggctcatcacgtagatttgacacgggttccactcgtcccagagcgtcgggaatacctcaaactcgccaaaaccgagggcgagatagaagcggttcgtcgcgtcgtactcagggtacttccccatctgcacggtcttgacctgcaaaaacgagtagccaagctccttcgcccgctgcttcgctgcggcaaagagcatcttgccgacgccgcggcggtggtattctttcagcacacccatgacatagagttccgccgtatccctccccgtttcggcaaggtaaaggaagccgacggcgttctcgccgtcgaacgcggcgaaaaacggctgcttaacactcttttcgatgtattcctcgcgcgcctctggaatgccaaaccagtcgggcagcgattctaaaataaagcgcgtaatgcgccgcttttcatcgggagtcgtaatttctctgatctccat

SEQ ID NO: 86 - DNA, 11781 bp, unidentified
  source 1..11781: mol_type = unassigned DNA
ttatttttccgccgctttgcggagcaggtccacggtgtgttcaaaagccacaccgcggacatcaatgatccgggagttttccgcgattgctccggtgatttcctcccggaattttccggactgttcttccgtgagcaggtttttggaactcagggagcgcgtgatgagctggaggacgtaccctgtttccacgaaagactggcgtcccacggcttttttcatggcttccatgaattccggggcgtgttcgggcggcaggccggccacggccttttcataagcgcggatgaaggaatccaccggggctttggaaacttccgtcttagtgaggtcaaagctggattgataagcgagagctccttcttccgccagttgaagggcgttttttccgaatttgttgacggcagtcatatccgctcctttttccagtagcagggccgccacctggaaattaccgcgcatggctgccagcatgaggggcgtaaagccgttgccctcccggttgttgatgtctgctttcctttcaatcagcatgtcggacaggcggtccagcccgctccaggaagcccagtgcagcgcggtccacccgtccttgtcctttcggtcgatttccacgcgggggtcttccagaagccggtccagatagggggcccgagtggcttccagcttcagcgtggtctcaatgttgttgtagttggcgtagcatacccacatgacaggagttctgccatggggatccgtcatgttgacaaaagcctttccttctgccgcagccagttcttccccttccttcagggtttgttcgaattccttcatccccttgactcgggcttccttctcctcctgttcggaggaagcgttgacttctttggcctccgctttcttcattacggtgataaggtccagggccgggttgggatctccagagaaagatttggagaccaacaggctgagaccgccgaggagggagctgaaagctaccaggatgagggaatccacaatgatgttgcgcgtgtgctggttcatggtctcgtaagttcaggagttggcttccgtaaattcttccgccgtcagggcgggatccgtttccgcttcaatggcgctgatgggtggcgatgccgcgtcttcctcgggatggtccgaggtgatggtcctgcgggtcatgataatggcgatggggctgattacggccatggccaggtaaatggtccacatgaattccggggagtcccagaagccgatgtgcccggtatccatcttggcgcagatgccgtcatagcagaggtaggcgacgagcaggccgccgatgatgccattgatgggtttggcgatgaacatgggaagcgccgccagagacatgtaggaggccactttgtctttcggagctacccgcgccacatattcggagaagcggggggagaagagcagttccccgaatgcgaataccaggatctgcgccacaatggctaccagatacgcctgagagcgcgtttcaatgccgggcaccaggtagtaccattcaatgggaatggccatgaaaacgagagagaaagcggagatggacatgcccgcaatcatgagaccaacggtagagaagcggcccagcaccggaatgagcaggatgaggccggagacgatgatggccgggttgacggcattgatggagcctatggcaaagtcgtcatatagcgtacgcacgtagtatttgggcatcaccaggaattgcagcgtgaaaacgatgcgcacgcccatggtcagcacaaggaagaggataagtttgcggaaggcggattccttccacacctccatgaagagctggagaggtctgcggaggggggcattgatgttcgcctcccgttcgctgggttccgcgtagttgtcttcattaataaaacgggtggtgatgcagcccagcagcaccatcagcgttccgaagttgataatccagtatccgccgtccacggcgccgaagtgcttgcggaaaaattcaatcaggaacacgttcgcgatgacggcggaaatgttcatcagcaggtagtagatattgaagcccgtggaacgcgctttcagcggagtgaagcgccggatggaagtttggatgacgggggacatgaacgccgtgccgaaggacataatcagaatgcccgccatgacggccagccttccggagtccacggttgggctgaggtccggaccgaagcccatgataaggcgcccggcaatgaggatgatgaagccgatcaggtaagtgcgccgtatgccgatgatgtcgcagatggaacccaccgcgaagacgaaggcggagatgaaaagggtgtacaggcctacccagagggcggcgtccgcatcgttgaagctgcaatagtctgtcaggtagaggacgaataccgtaatcatggaaaaataggccattccgtcgaagaactggacgacgttggtaagccagaaatccttggatacggttttcaggatcttgaattccgaaaaatatttgaggatggggtttgcggactcattcatggagagatggaaacggtaaggaaaagttgacgacgatgaaagagtgggttacacgcatccccgtttcaagatttttttctcccaaaggccggtttgaccggaaaaatgcgcttcatcgccggggaaaccgctatctgggcagaatgcgtcggaagcctgccacgtggcaccatgacaacgctttcaggcattgttccacagccatggcgtccgaaggcagcacgggccacagcccggcttcctttagccctgatttggctatttccgccgctttccattcgcggaactgggagggaagggcggagaaagtgaaaaaggcccagcaggccagcccgatggccagcgcgatctggaatttcaacagtccggccgtcagcattcccagcaggataagagctgtgaaaaaaggaatcatcgtggcgcgcgcagaggcggttttgcgggcttttgccgcctccgggtcttcccggaccaggctgctcatggcccaggtatgggctacgcaggccagccggcctgcggtcaccttgccttcccatgccggaggaaggctgatgaatccgttttcatccactccgggaaaccgggctttctccagtttccgctggcgtttttccgcaccgtccaggcggtggattaatcccgccgggccggggaagccgggcagttcccgggattcgtaggtgcgcaggggaatgatgcctttggtgaaacgcagcgcggcaatgacaccgagcacgaccacggaaaggaaaatcactactgcgaatagcatagacggttttttctcatatgcccgtgtgtccgtcaatctctccggctggcatgaagccgtccttcccggccagcagccgggtacgggtgcggacatcgttttttccttcttttcccgcccggaacgcttggaaaacggagggatggagcttatgtcggaatgatctgcagttccgggtgttcctctgggcgggcacaacattccggcatggattttcttcatgccggaggcgctggatttgggttgattttccggcgtttttcatgtaatggctgaccgcaatggtccatattcgggaatgcatgaggaggtggctgccgtttgtcataatggcggcctccctgggtgtgtctctcgcccaggatgtagcgagccccgatgccgcggatctggatttggacctggtcaaactgaaaagtggccccaagggcagacagagggaagccatgaggaaggtcctcctgcttgtgcatctgaagcaaaaggaaacgtggctggcggaatccacgggggatgaggccgtgcatctggcggcggagatttccttccgccggtatttggcttcagtggatatgggcggatgcccaggggaattcaagtgcgctttcctgcggtatgcaaagctcctgaattcctttgaagaaaaagatttgaatagtgtcgcggattttcctgcggtccctctgcaggctgccggaagagagctgttccgggtgctgcttacttaccgtctggagccggagcatctgctggaggaaatgaaagcgctggtggatgaggaaattgagggtaaggaggagctgtctgcaggacagatgatggatattgtccggggaatgcgggaagccctgcaatccggaagccgcccctttccggcggaaaggcctccggaagacagggtttccgggatgtagcggcttttcatggatggcatgccggtaccgtgaggaatcttgtggaggcatgtcggaaagtccgctccggctattccggaaggaaaatggattaagacggctgtacgtcacggtttccaggcggcggccatcagagtctggaaatggggcgggtccggctccctgtccacaatatccgtgtggatgttccggaatcccgcttccttcagcatgctttccagggcggcgggcgtgaagcccagccagcggtccgcgtaaagttcacgggcttcctcctgtccatgctggagcagatccagcaccaccaggcaaccgccggatttcaggatatcccacgcagcttccagcgctctggacggcttttgcgcatggtgcagggcctggctgagcagggccagatccaccgtgccgggtttaatgggcggcgcttcgatatcgcccaggcggtattccagattgtccagcccgtgtttgcgcgccagctcctgccccagctccaccatgctgggggagttgtctacggcgatcacctgtttggcgctgggggagatgagctgggaaacgaaaccttccccggctcccaggtccgccactacgtcatagttcagaatgcggagcagagcaccggccagcgctttccaggaacggccgggcgcgtagttcttgcccagacggcacactacttcgtcaaaataggcctgggtgcggtttttgcgcttgtccaggataacctgaagggcttttttgtccgtttccgcctccggcaattcctcgcaggctttcagggctacattgtgcagatcacctgccagggaaagagtgtaaaagacgtttttgccggaacgggcgtcctccaccaccccttcctgccggagctgggccagctgggtggaaatgcggctttgccccatgccgagaatttcctgaagttccgcgacgctcagggattcttcattcagaacgttgatgatgcgcaggcgggtgggatctgccaggagtttgagcgtttttagggttgacttcatagcggaataatatatcaacacatcgagatttatcgatatgagtagaaacacccctcacatctttacgtcggaatccgttggagaaggccatccggacaaggtggccgactacatttccgactctattttagacgcctgcctggctcaagacaaaactagccgcgttgcatgtgaaacgttggtgaagagcaatatggtcatcattgccggagagctgacgaccaaagcggtgatcgatccggaaaaaatcgcccgccaggccattcgggagatcgggtactgcaacaggcaggacgacgacgttttccatgcggataccgtctttttcacgaatttgctcacggaacagtccccggatattgcccagggagtggacgcccgggaggcggagggcaagggccatgcggagcagggcgccggagaccagggcattatgttcggcttcgcaacgaatgagacgccggagctgcttccggcccccatcgtgtttgcgcataaactgctcattgagctggccaggaggcgcaagcgcgggcatgtggactggctgcgcccggactgcaagtcccaggtggctgtggcctatgacgaagacgggcgtcccgcgcatattgaaaacgtagttatttccacccagcacacggaagacgtggaccatgacacgatttactcatattgcgtcaaactcattaaaaatgtgcttcctgcggagcttctggatgagaggacggaatatttcatcaaccccaccgggaaattcgtcgtgggcggtccccacggggattccggcctgacgggccgcaaaattattgtggacacatacggcggcatggggcgccacggcggcggagccttttccgggaaagacccgtccaaggtggaccgttccgccgcgtatatgtgccgctgggttgccaagcacattgtggctgccggactggcggacaaatgtgaattgcaggtggcttacgccattggctaccccgctccggtttccatccgggtggatacgttcggtaccgggaaagtggaggaaatatccattgaaaatgcgctggaaaacatcttttccttcaagcccgcggatatggtgaaacagctgaatctgcttcagcctatttaccggaagacgacgcactacgggcatttcactaatccggaactgccctgggaacagctggacgaaacgcgcctggccttcctgaaacaacttcttcattaatcctacgacaacgcttacagacatgttttcagaaacggaacaatacaaggtgcgcgatatcggcctggcggatttcggacgcaaggaactggatattgcggagcatgagatgcccggcctgatggccgtgcgcgaaaagtacgctgccgccagacccctggagggcgtgcgcatcatgggctccctgcacatgacggtgcagacggccgtgctgatagaaacgctgacggctctgggcgcttccgtccgctgggcgagctgcaacattttctccacccaggaccacgccgccgccgccatcgccaaatccggcacccccgttttcgcctggaagggggaaacgctgcgggaatactgggactgtacgtggaaggccatgaactttccggacgggctggggccgcagctgattgtggacgacggcggagacgccaccctgcttatccaccgcgggtatgaaatggaagaaggctccgactgggtggataccccgtcggaatcggaagaagaggaagtcatcaaggctctgttgaaaaaaattgccgaggcgactccgggtatttttcatcgctggcttcccgagctgaaaggcgtttccgaggaaacgaccaccggcgtgcaccgcctgtaccagatgcaggcagccggccgtctgctgattccggccatcaacgtaaacgattccgtaaccaagtccaagtttgacaacctgtacggctgccgtgagtcccttgtggacggcatcaagcgcgccacggacgtgatggttgccggcaaagtggccgtcgtctgcggctacggggacgtgggcaagggctgcgcccagtccctgcgcggcatgggagcccaggtggtcgtgacggaaatagaccccatctgcgcccttcaggcagccatggaaggctaccgcgtgctgacggtggaagacacgctgggctgggcggatatttacgtgaccaccacgggaaactgcaacatcatccgcatcgaacacatggaaaagatgaaggaccaggctattgtctgcaacatcggccatttcgacaatgaaatccaggtacacaagctccagacgtatcccggcatcaggcatcttaacatcaaaccccaggtggaccgctacacgttcccgtccggcaacagcctgtacctgctggcggaaggcaggctggtcaacctgggctgcgctacgggccatcccagcttcgtgatgtccaacagcttcgccaaccaggtgctagcccagctggaattgtggaatacccgtaaagaccgttccgtgggcgtggaagtgctgcccaaggtgctggatgaggaagtggcgcggctgcacctcgccaagatagggtgcaagctgactgtcctgcgtccggagcaggcggactacatcggcgttccggtggaaggtccttacaagccggacttttacaggtattaaccttgtcaaggttttcttttcccggccgttccgcgcaggcctgtccggcggaacggcttttttgttttcccgatgatggaagggagggaggcagggtatcagtacgtttatttttcttcctgttttttatgcaggatccctgctgttagtgaaaaaaaggaagactttttatccggtctttaatgttcaaatacctttgcagcaggcaaaacgggagcaatcttggaatgctgaccagccaaagccccggcctgcattgcaggatgttccaaaaccatttgagtttggtaagaaggctgttatcgaatgaagcataggggaagagcaggagccttctctgttccgcctgaatcagcctcatcaggcggtcggcggcctggtatgttatttccccggacttatgctttccgtatacctctttcatgatcattatccaggttgttatctggaattccgatctcttgatcagggttgtcctggggttcccgctcttaaaattgcagatattgctgttgtgtctccgatagtacgaacaccgtttgccggatgcgaccatgcctgattttttcaaataggcgcgcatggacagcatcatatcgtccgaaatgccgggacctgaaggcaaatactcgaagtcgctgaacaaagacctgtggtacatggcatttccgccaaaacagctgtaaacatgggaaatgtcaaaaatacattccctgtaaggtttgacgacgacggaatctgagtctggcagcatgcgtccataggcgggttgtccatcttcatcgatttcattataagaatggcagtaaaccagatgaccgggatattgttccgccagagacgccaacgaggaaatcctgtcttcccgggcgatgtcatcgccgtcaaacttgataatccattccccccgggacaaatgaacggcacattgcaaattccctgcaattccccggttgctttcgttacggtggagaataatacgccgtccttctccctctttttccaccatttcttccaggcattcaaaagaaccgtcctgagaaaaatcgtccgaaataattatttcccattctcctggataatcctgttttaaaatagcccggaactgttccttgataaaacgtttctgattgtaacaaagaagaatggctgaaatcatgaaatcgaataaacagtttaagtttttttaaactgtctaaaaataacgaattccaaattcgattggggaattccaaatccgctgtaattaaaaagagattgcgtgcggttgtttctgcatgacaggagagcctcttcgcagaaaggaaataaaactgatgatcaataattttctttgaaatacggactttccggcaggtatggatgtttctgccggaatgggaattgatggggttacccggatggaatcatgaagacggaagatcccggtcattggggaagcttattttcagaagttcctttctttcaaaatttaaccttgactccggatttggaatccgtgtaatatgccccgcactctttttactgtgcgtgcactcagagagcaaatccctttttttcaataatttatgttgaagggtacggtttgtttctcaacatcaaacggccatggatacttcttcccggaaaacgtctcttgttgtgttgttcaaccatcagtatgaacgtaacattccggtaatcagagagctttattcaagacgcttttccgggttgcttcaattaatgccctactacaagggagatgcccctgacgtatgttccgtcttcgggaattctttccagttctataattatattttgcagtccagggaaagaatcaggcggttggatggcgattattttcttattatcggagacgatcttcttttaaatcccaggtttgacgaattttcaacgccgtccctgctgggaatccatggggaggatacgtgttaccttgacggttttgtggatgtttctcttccggtgtgttaccggggaacggcggaagcccaccatttttccataacccctcccggtattgatgcggaaagcgtcaacaggaacgttccgtcctatgaggaggccaggcggattttaaaatccaggaacctcatgcggcatgatgaattgtcgcgcgtacgcatgtttctgcccaaatggagctccggggggattcatgcgaattggaaagtgttgaagggcagggtatggcatctgctgaattactggaagcaccggattaaaaaataccggtattcctatcctgtcgttttcggatattcggacattgtctgcattccgaaagggaaattggacgatttctgccgtatccttgaagtgttctccgcatggaacatgtttgtggagctggccattcccacggcgttgcagcttcttcccggaacaaagctggctacgctggaggacactcagtacaagtcgggaaacgtctggtttccccaggatccggaacactttgaagccatgaatgccgtcattgacgggctcgtgtcctcttccggaggagacctcggcaagctgcttgcctcctttccggaggaatacctgtatctccatcccgtgaaattgtcccgcttcgccagatagtggcgtcaataaattggtctttttatcccatgatgaaatatgctgtgatcggagccggggtttccggattgtccatggccggaatgttgctgaagaaagggcatgaggtggtcgtttatgagaggggttcccggcccggcggcctgattaaatgcacggaagtacaggggaacctgtatcatcgtgtgggcggccatgtgttcaattcccggcggcaggaagtgctggactggttttggtcccggtttgacagggagcgcgattttgtttccgcccggcgacgggctgtcatttccctggagggcggggatgtggtggattatcccattgagaaccacctcgaccagtttcccgaggccgtccgttcctccatcgtccatgagctgctggaactttacaggaatcctcccgcggagccccgctccctgggtgagttttttctgaaccgtttcggaaaaaccctgaacaacctttatttcacgccgtacaataacaaagtgtggaggcaggatatcagccaaattgccatggattggctggaagacaagcttcccatgccgagcgtggcggaaatcctgttgaacaatattgggcacatcaatgaaagcgccatggtgcacagttctttcttttatgcgaaaaacggcggttcccagtttctggcggatacgctggctcgcggccttaaggtcaggtaccggcaggaagctgtaaatatcctcccgaaggacgggaaatggctcgtgcagggagaattgtttgacagagtcgtctttacggggaatgtcaggcagcttggggattgtttcccctgcgtggatgaattgcgcccgtttttcccccggatttcagaattgcgctctcacggaaccacttccgtgctttgccggatttcccccaatgattacagctggatttacatgccctctccgtcccaccgttcccaccggatcatttgcacggggaatttttccagaaataataataacggggacatcaccaccgcgactattgaattttccgagcaaatgacggaaggggaaatcaggcgccagctggagcttattcccttttcccctgtgtatctggcccatcactgggaagaatatacctatcccgttcaggatgcttccagccgaaccctcatacgggaactaaaggagcgcttggaaccgaaaggcatttatttattaggccgttttgcggagtgggaatactacaatatggatgcggccattggcgcggctcttgatttggataaaaggctggcagcggagcagatgccacggggataa

SEQ ID NO: 87 - DNA, 6608 bp, unidentified
  source 1..6608: mol_type = unassigned DNA
tcaagagacatgtcttgaaaaatactttttcatgaagagtacgtatattgcgctcaacagtaagatacaccctatcaagaagatatagccatactgttggtaataaatatatcctactattataaaagtctgtattgtcatataggccagagagactatgacatgaggaatcttcagttcattcgccataatctgatacagatgcttgcgatgcggtagcccgatattctcatgaagcatcaggcggtgaatgatagtcagtacactgtccacaccataaacggataaaaggactatccagctgaaatcttccgtttcaatgatgagcctgcctatcaggaaaagaaggatgaaggcaatgctcaccgaacccacatcaccggcaaagcatttggcacgcttgcggaaattgaagaagcagaagactagaacggaacagataacggtatagatgaaatccgcttctacaaaagtaaccacctccttattgatataggccaacgcagcaagaataaccagagaataacctcccgttatcccattaatcccatccataaaattgtaggcattgatgatgcccgtacagactatcaaggctatgactatccaccaccaggacaaggagaacagcccccactgataaaacatcatagccatagcagagaaatgaaaaagcagccttgtcatctgtccggtggattttatatcgtccacgaagctgatgaacgtcaccagtgtcaaggcaagcaggaaccagggatattcaaagccactcgtcaggaaataggcaaacgccccgaaatagaaaataatcccaccaccgcgtaaagtcactttcgtatgggaactccgctcattgggcttgtcgatgatattgcacctatcagctattctaaaataaaaaagttctgctaaaaacagcagaaccagtataaacagataatacataacagtattttcctctttaatttttaattcttaattgtttacttttatatttgagaacgattttatcgttctcactatcccctcctctgccctcaccggcattctgtcaatacccagggcagcctttatcttcgcattactcaccacataattctctgtcaacttgcgcagacgctctgcattcaaaggcaaatggagcagagtcccaagccgggcacagaattccatcagtcctctgtttatcttccagatatgcggcttgcgctccaaagcccgacacatcaaagttatcagttcatttgtggacaaggcttcgtcatctcccatgtggtagataccactcgccacctccttggtcaaaagaccttccaccacgtagcagagattgtctattgaagtaaaagaccttctgttctcaaaagcccccaaaggccagggaatgcctttcctcaccacattataaagaagattcagattgcctttgttgccgggaccatgaatcatgcagggacgcaggatataaacctgcttgtcatcataaggattagctttcaatttcccattctcaaccttcaacttgtcaaggatgtaattctcggcagctatcttactttccccataaggccctaccggagcaggcaccacatcttcagtcagtatatcacccaccacactgtcggcagcggcttttaccgaactgaagaatatgaatttcttcgcggacgattccagaaagaaatcaaatatcttttgggtcaatccggtattaatatcaaaataggattgggctgcggaccggtttttcgtatcatgggctttaccagccagatgaataatggcatcgaatttcggaagattccgcatcggaaaagaagccggttcaatatccttccaggagaaagtctttaccaccccctccttttcaggagcgacaatatccagcccgtaaaggctatgacgttcctttagggcaataacaagattggaacccacaaagccgtggattccagtgacgagtatgttcattgaaatatgctaaaaaatatactgaccggaaacgtgattattggttatgtatttgataaaataagtatctccaatgacagagaaaaaaatataccacgtcgtattagaattacgttgataagtgatgtaatacatatccttaccataacgttcaaaaaaagcgggcgctttctttttaaatttagaatgaatgttctgttgaatatcagctatcagttcttccacataagaaatagcaaaaggataagtacccaaatactccttctcaacaagtatttttataagcccatacaaatcctcctctacttcgggagcgaatacgactctcatccaaacaaagcctttatacgagggcaaagtctatccaataattcttcaccggaaatagcatgcctaatgtcatcacgtccttccgtaaggatattcggattattctcattacccgtatatacaactaccggttcaccaacattcggcaccatcggttcttgttccttatatggcttaatcttcctcatacatccaatctttccacaaagatatccggaaatatcaagttatcctaattattgactgataaatatcgtatgttcataaagcttcaactaagtctacatatttttgagttaccacatcctttgaatataatcgctcaatcacctccacaccatttcgacccagtaaagccagttcgctttttgagacggaattcagccaatccgccatttctcccaccttcttttccaaactcttctctgtaatcaattttgcacagccatattcctgtaggaaattgatgataggcgtatcctttcccgagcagaccaataaaggcctaccacatgccatgattgtataaaccttggaagggaatccctgcatctccatttcagggttcatgaaaataaactggatgtctgaataggcaagaatggacggcatcaaacttctgggctgatagggcaaaatatgcacattatccagctccaactcacgtactttctcctcaagaacgggtttcatgactccctcaccgatgataaagtattcaatggaaccccctttcgtcttttctgccagacaaattaagggctcccaatcctgggcataaccaatattcccggcataaagcaatttcaaagaatctgtggcagggaaaaaatggggattcagacattctacatttccaccctgagaattatacaattctgtatctacaaaattaggtattatacaaagcttggacttatccttaaaccttccgactattacattataaaatacctggtctattgtcgttacggccgttgagttattataaacataccgttccatcctacgtagctgttctataacaagcccgtcctttcgtttcaagatgtcaggatatatttcctgcacattatatatggttttacatcccttgattttcgccagccaaatgtttattacaccaatagtcaaaggaggggaaggtgacagtatgacatctatatttctctggaacaaaccaatcaggaaagagataatatgccaatagacaaatcccaggacacgcagaaatgtatttctgaatttcttctggggtacatgaagaactctgattccatgaaaacagctttctttacaaatcccccaaaccttccatttcagaggttgtgctgccagttgtgattccacaacattgtaatgaggcgtagttgtcaataccaatacttcataaccgctttcctggaatttcagagcaatatcattataaagataggctgtcgaaactccatccggactgaaaatcaagctatgtatcaaaattttcttaggcatgtctcaccattattttctccaaaccatcttgttcaccacccccgtatagctctgaatcaacttcacaaccttggccgatacattctcatccgtataattgggcaccggcagaccatcgtcctcattcctattcatctccacggcagtatctacagcctgaagcaaggatttcccatcaatgccggcaaggacaaagatacccttgtcaagagcctcgggacgctccgtactggtacggatgcatacagcagggaaaggatgccccacagaagtgaagaaactgctctcctcaggcagggtaccgctgtcactcacaacggcataggcgttcatctgcaggcagttgtagtcgtggaaaccgagaggttcatgctgaatcacacgtctgtcaagtgcaaagccacttgattccagacgtttcctgctacggggatgacaactgtaaagtatgggcatgtcatatttctcggccatagcgttaaccgcgctgaaaagagacaggaagttcttctccgtgtcaatgttctcttcccgatgcgcggaaagcaggatgtatttacctttctggagatgcaatctctggtgaatatcgctggactctatttcggacaaattctcatgcaggacttccgccatgggcgaaccggttacgtatgtacgttctttcgccacgcccgaagcgttcaggtatctgcgggcatgctccgaatagcagaggttcacatcggaaatgacgtccacaatacggcggttggtctcctcaggcaggcactcgtcaaagcagcggttgcctgcctccatatggaagatggggatatgcagacgtttcgcacctatcacgctcaggcaggagttcgtgtctcccaacaccagcacggcatcaggtttcacctgcaccatcagcttgtagccggcgttgataatattccccatcgtggcaccgaggtcatcgccgacggcatccatatacacatcggggtctttcagcttcaggtcacggaagaagacaccgttcaggttatagtcgtaattctggccggtgtgggccagaagacagtcaaaataactgcggcatttgttgatgacagccgccaagcggatgatttccggacgggtgcccactataatcagaagtttcagtctgccgttctcctgaaacctgacttgcgaataatccaattttagttccatctgttcctatattctttaactcgtttcagactttttcaaaataagtgtccggacgtgccgggtcgaaacactcgttgcaccacatgaaggtcaccaggtcttccgtttccgaaaggttgacaatgttgtgcgtatagccgggaatcatctccacgacctccatcctcccgccgcttacctcgaagctgacaacctcctccgtacctatcttgcggagctgtatcagaccgtgtccgctcaccaccacaaacttctcgttcttggtatggtgccagtgctggcctttcgtaacgcccggcttggagatgttcaccgagaactgcccgcggtcggaagtacggataatctccgtaaaactgccgcggtcgtccacattcatcttcaggggatagctgaaccgttcttcaggcaggtatgagaggtatgtggaatagagtttctttgtaaaggcatcgctcaaatccggaacggacaaggtaccgggcatttgcctgaaagaccttatcagttccacaatgccgcccaaggtaatggtatgtactacgggcacttcgcaataatcaccgttgcggtgttccctgccgcccagggcagagacaagctcgtccaccacatcgtctatgtaaaccagatgcatcaccaccgaagggtcgtttacccggatgggctggtcatgggcgatgttgttgcagaaagtggccaccgcgctgttatagttggggcggcaccatttgccgaaaacattcgggaagcggtacaccagtacctttgcacccgtttccctggagtactcgaacaacagttgctcccctgcccgcttcgattcaccgtaagggttgtcgagtgcggcctgcgtggaagaggaaatcattaccggacaggtattgccgtacttcttcaatgtatcaagcagcgtggaggcgaagccgaagttccctttcataaactcagacgcatcctggggacggttcacgcccgccagattgaagacaaagtcagcttgtctgcaatagacatccagttcggcagggtcactgtccatgtcatattcgtaaatggtaagttcctcacccgcaatgccgtaattacgggctttcccgtcacggatgttgtgcagctgggatacaaggttccggccgacaaaccctcgggagccggtcactaagattttcataaactaatgggttctgtttgtcacagaaaagagaagatattcatagtgaatgacagaaatcatccaaacctataaaacttacttttgggaaattatattgcttcaatatatgaaaatgatgatcttccgtaacaataaacttggcattagccacaattgcacagtccacaaacttattatcatccggatctgattttatcagattgaagttataataaggagtaaagaacaaagtataaggattattgagaatgacatcaatcaccagcttagctatttccacacctaccaaacgttctaatatttcctcatattcattaagaatttcatcagaaacgcataactgattcgttccatccaaaaagcaatcccaaatcttacggtacctgcttttgggagaaatgcactgtatcaagctatttgtatctaatacaattctattcat

SEQ ID NO: 88 - DNA, 17665 bp, unidentified
  source 1..17665: mol_type = unassigned DNA
tcacctcttcgtctgaatcccatacaggtccattttctcgtacagcgtgctccggcttatgcccagcagtctggcggcctctttccgattatgcccggccttttccaaagcctggcatatccgcttcttttccatgcattcccctttcaaggcaatgtcaggatcggaaggctttccggactcatccaagttcaattcttccgccgtcaccaattccccttgggcaaaaagcacggcggattggaccgcctgtttcagttcccgtacgtttcccggccagtcatgggccagcaaccgtttcttcgcctccgcatcgaaaccttttacctgtctgccatgctcttggttgtaaagttcccggaagaattcagcaagcggcaggatgtcttccgggcattccctgagcgggggtactttcacggtgtactcactcaatcggaaatacaggtcccggcggaaacgcctttccgatatggcttcttccagattctcgttcgttgcggtgatgatgcgcacgttggctttcctgtcttttgtgccgccgacaggacggtaacgcctgtcctgtatggcgcagagcagcatctgctgtacgccgaggggaaggttgcctatctcatccaggaacaacgttcctccctcggcttccgaccaatagccttccttgcgcccgaccgccccggtaaaagcccctttttcatgcccaaacaaggcggaagcggccagactttcggataacagcccgcagtccactgtcacgaacggtttgtccgcacggtcgctttgggcatgtatcttttcagcgatatgtttctttcctgtaccgttctcaccccgaaccatcacgcagatgtcggctttggctaggacgtggagacgtccgaatactttctggtaggcttcgctctcccttatgaacaggggttcctcatggaatgactgccttttctgcaagtcttggagcatggcgggaagctggctggtcagcagtttcttggggatatagtcttccgctccggatttcatggaacgcacggcggtaggcacttccgcataatccgtcatgatgacgtagggattgtgcttcccctcgcggcgcagttcttcaagcaacaggatgccgtcaccgtcaggcaaccggaggtcggcaagcacgatgtcgtcatcttccagcattgaaaacagtttccgggcaccggtgcaatcggaggtactgactgtccggtatccgttttcttccaaaaaattgcagacatacctgctgtacacaaggttgtcttccactacgattatctttcccatttcttcatctcctttctggcggcttctatgatggtttctccttgttccaacacggcacgggctgcataggcgacttcttcgtccgagtacggttccttgtggatggcttcgtgcaacttctgcaaggggcgttccgtccgtatcaccatccatgagctcctcaaatggtgtacccagctgttcaaggctgtcaagtctttcctttcggatgccttccggacttcctctatctctttctccgtttcggcaatcagctgctccaatgttttccgcttgtcgccgaaagccaacagggcggagaagtccggctgccggttccctctttcacggatgcagtgccgtgtcgcctccatcagttcgtctatggaaaacggcttgggaagcaatccggaaaatccggcttctttcagttcctcctccgatacatagccggccgcagtagctgccacgatgggaagttcacgggaattgccgatgtcggacatgcgcagcagttccagaatctcgtagccgttcgcttccggcattctcaagtctgttatcaacaggtcataatccttgctccgtatcctgtcggtcagctcggccaacgtaaggcagttgtcgcatgaaacgccacattgaaggtacatctcgcgcatcaggcggagcgtcaccgggtcgttgtctatggccagcacggaacatccggccagtgaaggacggacatccattgacttctcttcttccggtacttcttcggctttcggcagcggcaggacaacggtgaagcggcttcctatgccaggtttgctctgtacggaagcagaaccctgcatcagctgtacgagattggtcacaatggcaaggcccagcccgaagccgtcctgagtcacagcattgcccagacgttcgaagggggcgaaaatctgttcctgcttttcttccgggatgcccgtcccggtatcctgcacgtacaggatgaagttgccgtccttatagtccgtgcagagtgtaatgcgaccgctgcgggtaaacttgaccgcattggagagcaggttgcttccgatgcgcaatatgcgctccttatcgcctcccagcacttctgtcgtctggttgtcagtcacgaattcgattcctttggcttcagccaaaggggcgaactccgtttccaacacagttgctattgactcggagcggaatggacggatatgcagcttttctttatggatctccagcctgaaaaattccagcagctcggtggtcatggaagccatgcggctggcagattcacgcacggttaatatgtggcgtacccggtcttccagggcttcatcccggagcaggagttctgcattgccgcttatcgccgtcagggccgtgcgcatttcatggctgacagtctgcatcaggttgtgacggaattgcagcaattgccggttcttctcattgctcgcctgcaattcgccgataagttcttcgcgtttctttttttcgccatgattgcggcggatttcccggtggatggcgatgtggaacaggattaaaaggaggatggcggtggacaaggtagaggtgagcaggagcgtggaacggctttgcgcttccattatcttatgctcacgctgaaagaaggcttcctgcacttgcctgtccagattcttgatgaggtggttcagccgggcgttcaatgccagattgcgggcgtacaggctgtcggcactggtttccatatcctccgtcccttcctgctgcatggcaatcaggctgtcactgaatgcgtgcagttctccggcggaaggcaaaacccggacggttttcttggcgcccaacgctcccagtatattgtcccttcttttcctcacggtgcgtatgcgggtggcacgttccgccactttgggcagatggtggacaagcagactgtcagcagcatcctgtatcccgatggcttccacgacacggaacaagtgcatttccttgtcggcaagcaggtgccggagcgtgtctatctgttcgggacgtacatgctgcctgcaccggggcttcaaggccagcagcaggctgtctgtggacagccgtttctggcgatagtttgccgtatctgcattttcttggctgatcaggctctcgcccagcagggaaagctcggtgatgtgaaggtgtgcggcatggatgtcattccgtaccgattgcaggtcatgcacttcgaaatctatctcccgcatccggctacgctcacgaaagaggataaccaccattccgactatggcggccagcaacaggaagttcccggcatatatcttttgtgtcaaggatactttcattgctagtcatattatccgtagtgcattctctcatcagaatgtgctacctcgtttatgggcaaaaatagaaattatcaaccacaatccatgcgaccggttcagagtttatgaataattatttttttagaacgattcaaaacaaattgagccgcaccatgacgggtgtttgattgtaaaatagtcattgggattatgcaagcgtaacgcaggcatccgaacgaacggatattacaacatccggcaagagtgcagacaatgcaaaatgcacagagagtctgatagacaatgcaactacttgcatacaggtacaacaaaacaatggcgactacaacatttgggttcatagttgcagtcgccatttcacatgcaaaggttgtacctgtggttcccgaaaacttacgatttctttcctgcttcggatacagctacaaaaatagccgtcctgattccgggcggctattataactacttgcaggtaattgcagacagtgctttttaatatatctgtctacaaggtgagaaacaacaatcaattgtcactcgtccctccattatggtttctgttgtaagaggttgtcacgactgccacatcaccgtattgtcttccactgacggaacggttcaatgcggagacggtcaaagtggtcacttgttgagtacctgccacgtgcaaggccgtaccgacgggcaaggtcacattgatggggtaagttcccgtagccgtagtgacacctgcgccggcaatgcgggccagaatctcaatcaggtaagcggttatccgactggtcccggacgaagtgatttccgttccgatgtgataagtgaacgaggccgaaccaacggtcatgtcacccgatccatacaggttgtcccacaggtcttgttcaaaggccaacggcgtgcttgtggaggaagaagtcacatccgctccaaagagcaacgtataggaagtgaactggtcggcaaacacgattacttgtccgccttctacagtatattctgcatccacccattgcccgttcacgtatttctgtgccgtgatggattgcgccacttccgcatccacatcgtaagccaattcgatgggacttgaaagcgtggcgttcgcatcggtgcaagccacgcttgtaccaatcagcatgacgctttcggcagcacgggaagtggcacgggtattggcttcggcttcatccagcgtgtaaagcggggtaaccacgatggaacttcccgcaggcaattccgccgtctcgggtacggtgacagccactgtgaccgcgccctcgtcattgccttcgatggtctctgaagtcacgttggcctccgtatcgccgttggcggctacttcaatggtcgtgccttcattgggcaatgacacgttccatacgacattggctccgcttccgctttctgcaacggtgacggttgtttccttggactgtttccccggagcggaagccgtcagggtataacttccggcatccacatcgtcaaaagtgaacgtgccatctgcgccggtctgtgtcgattcgccgttcatgctcacggtagccgaaaggccgttgccgtccatgccggtgacacgcccgctgatactgtgcgatacggacaccgtgggcggcgtcacgttgctgtaatccggatcatcgtcactgcaccctacgaaactggtgcacaaagccacactaaggaatgcgaacattccccatcttgatagatttctaagattttccatttctaaaaataattaaacgattaaattaggttattttgaaattctgtattctagtagttatatccgtattgtttgtgtcttcaatcagggtgggtcttgcccaacaggtttaacttgaaacacaggccacctgtgaaatgtttcccattctgcaaggttgcctgcaaaaagaggtgtttccacaacaaacagtctgcgccgatgttgatatcgtcaccggtatattctatcgttgcccgaaggtttctggcaaaggacgggcgataggtgataccggcggctatgccccgccatttggcattgaaatccgatgtaaaatagcggtaggtcaaatgaaaaccaaattcattccgcctgtacatgacgtgtttgctggcggctatataataattctggaagtagtcgttgaccggatatttgccttcggcataggactcgttcaccttgctgccgggatcctgggtgcctatggcaattgcaggccaccatttgccttctttcagcggacgcactttcaggtgaaagtaccggtctttcttattatgtccgacatggccatcgttgtcaatccccttcagtatggtacagacatacgctatttctatccaagggaagggggtgatggccagaaaatggttggtcgtgttgaatttctctccttcatactggtaggtgtcaggaagaaattcctgattcaggaagaagaaaccgatacgggcttctccctctgtcgccatttccgccgtgggcacgtggatcatgccggtaacgcccgaatactcttgcgccctcaatatcggaatgcagcccatcacgacaaggaggccaatcaataatcttctcatttccgccctccttccttttccgagaagtccggcttcatggtgttgctgccccattgcagggcattgcggtcaaaccagccctcgcgttcgttctcctccgggtcggtcgtgtacattttgttggcataggcgtcaccttccatactgtatgtcaggcggaaattagaagccggacggaaattgacagtgcgccgtttccgcttgtaaggcggtatcatcatcaccaccttaaaaccggcattcttgccgccctcgttgctatactcgccgtacaatccgaccgtacagtggttgaaatgccgcatggcttcaactatggctccataatcttcatagaggaaacgtccgccccttgcgcggaactgcgtattccatttgttcagatagacatcggtgcccagcaaggcggtaatccgtttgggggtacttgcttcccagtccactgccattgaacaatagccggttaatccagcctgcacttccaatgccaaccagcggtttacgacatacatccctttcaagtccaatccataccgctccctgccgaacaagccgccgcttgctttcaggaaccaccgggatcgccaatgcgcctctttagataacaccgccatgttcaaccgtactttcttgtatcggtcgccatagtcgttatacaccggcactaatgcctgtgctgccgcctgccaccccttgcccatgttccatttcacaccgggagtcagattcagcaaaatctcatatattttcccattgtgaaacaaatcccggtagttgaaatccgcccctacaaatatatctacctgaccagcgggtatggacggctgtgcaattatggatgaatacccataaaagaccagcatgaatagcaaaatgaacagtttcttgcttattctctcgtaagctttcattttttcatatacgctcgtaattgttttattgttaattgatgtcatagttcatatcccggtcatctttcatctgataccttttaccacattttctacgaaacgcaagtttctcttcatccttttaacccaatgtgagccatcctgattttactctaagatggctcacattgaaacgacactcgcacaaagtgcctttcagtctttcaccagaaaagaggtgaaaggtttatttttcccaatcatttattcacactttcattagtccaaatataatccttcatgataaaactttgttttagcttccaccttaggtcagtttacaaggaactacacgcagaccgtgaaacgggctgctgacaacaaacggcggtatgctcccggagagggcagcataccgcctgttttgttgtctagggtttccaaaggggtgccccctttggcacacgactttgcttgcaaagtgtagtgtgttatacctgctggcgtggctgacagaggaaacggggtgcggtgcttcttgcaccccgtttgctccggcaggaaaacaggctgaatttttgcgaatgggaatgagcaaaaaatcggcctgttttcagagaacggcggcaggtatatgaaagcccccgtccctcgtccttcgctccgacttgtggacaaagtgtcccgaagtgtggccacactcccggaaaagtagcaggacagcaggcaaccgtcaaggctgaaatgaacgggtttgcacccggccttgaccgccgcccgccgttccgctgaatgggtgaacaaggcggccaatcctcaaagtgcttgaccgctctctttttgattttggagcatttcttttcccaaaattgaaatgggcggggaaaccattttagggctttcccgccttgattaccctttagcaaagacgggcggggctgtcaacggcggcgcatgaaatgcgccgttcatcttgaccgttgactggctcggctggctttgctatttttatcgaattgcatattggtaaattgcattgatatgtacttgggttgtattcacgattggcacattaacatcttcgggctttatggcaagtggcagctccgtacaggcgagaatgagtgcatctacattttctttttcaatgtatttatttgccagtgcaatcattttctctttatcactaggaattactatgccattctctaaattggggtatatcagttttcctaatagagatattattttttcgctatcgcctttacaagtaacatcatcgggcggcgaagttcatcttccatacccggaatatccatcatctctttaggcggttctgcttcctctacaactttaagctcaaacccattgttcagcaatcccattataatctgtgtaagtgtgtgatgttgttttactacatcacatcctaaaaaatgtgtatttcgttctcctgttataaagtaattatcaatcgcccaatattgcggtttcccatcatctgtataaatccaatcctgcccaactcctgcggtaaaaacagggtgttcgatattaaaaagaaaaattccacctggttttaatgtcctatacactttttgaaatatttccactatgtcctctatatagtgcagagctaaattagatataacacaatcccattcattttctggatagtcatattcctctaatccgctaatacgatattcaatttgatttcctgaattgcgcttttgggcttcctcaatcattttcttacttaaatcgatccctaatatttttgtagctccttgttcttctgcgaacttgcagtgccagccatatccgcaccccaagtcaagaacagattttccttctaacgaaggaaacaaaggttttaattgatgccattcaccagcagcttttaacccctctttatcaatgacaataacattcccttgtgtttcttcaagaattgctgatcgcaaactcgttttccctgaccctggttgcccaccaagtaaaaaagcggttggcgattcaaccgctttttttccttgaaccaattcttctaaattatcatttaagcgattttcaaattgtttgtcagtaaaattgactatatttgccatattaagccactttctctttattcaaaacttgttttgaatagcgattcattgaccgccaatactcatgaacggcttgtaattcttctaaagaataatcaaaaagatttacacgttttgcaagctttaattggtttaataaattgacttccaataattgagagtcatttttatttaattcatgattcaaaacatagtttaatactcgattataaacgcttgccgataattcgttaatgatctctatttcaaatgttttttcataagtaactgccatttcattttcactccttttaaagtttgtcaggtaaatatttccgaatatattcttctaaggctttatccataacttcttttacgtttccgccattctttgctgtttcgatttttataatatggtgcaagtcagcacgaacacgaaccgtcttatcccccataatatctttttttgcactgattggtgtatcatttcgttttgctttttgtgcgcctaaatttcccacaaccactcacttctttctatttcttcttactcttattttatcatcaacaatcacaaatcacaagtgatttgtgattaatcacttgtgatttgtgattctattctttttcgttttctaattgaatgattcgctcaagcatttcaaaaaatacgttctcatacatagataaaatcaatatatcccttttctccgatttttacaacggcattgtaggactttctatctttcgttttgattccttttaccagggtttcttttccctctagtaattcttttacatttgttttggtgagttttttctttctaaaatgttcagctaaagtgaaggtacattcaggataatttgaacaaccataaaacgatttttttaatacaatattgttgccacacttaggacattttcctacaaggggtcccgagcgcttagtgggaatttgtaccccttatcgatacaaattccccgtaggcgctagggacctctttagctccttggaagctgtcagtagtatacctaataatttatctacattccctttagtaacgtgtaactttccaaatttacaaaagcgactcatagaattatttcctcccgttaaataatagataactattaaaaatagacaatacttgctcataagtaacggtacttaaattgtttactttggcgtgtttcattgcttgatgaaactgatttttagtaaacagttgacgatattctcgattgacccattttgaaacaaagtacgtatatagcttccaatatttatctggaacatctgtggtatggcgggtaagttttattaagacactgtttacttttggtttaggatgaaagcattccgctggcagcttaagcaattgctgaatcgagacttgagtgtgcaagagcaaccctagtgttcggtgaatatccaaggtacccttgtagaatccttctgcaacaatcagatagatgtcagacgcatggctttcaaaaaccacttttttaataatttgtgtgcttaaatggtaaggaatactcccaacaattttatacctctgtttgttagggaattgaaactgtagaatatcttggtgaattaaagtgacacgagtattcagttttaatttttctgacgataagttgaatagatgactgtctaattcaatagacgttacctgtttacttattttagccagtttcgtcgttaaatgccctttacctgttccaatttcgtaaacggtatcggtttcttttaaattcaattgttttattatttggttgagtactttttcactcgttaaaaagttttgagaatattttatatttttgttcatgtaatcactccttcttaattacaaatttttagcatctaatttaacttcaatagactaataacaatgtttggtcttgcttcactttgtgcttgtcggaagcctaaatagtaactgcgttttgcttcgtgtccgtctggcaaccgctcaaattgttcatcaagttctgatacaccttcttcgttatagcgtggatcaaattcttctaaaaagtctgcttcctctacaactttaagctcaaacccattgttcagcaatcccattataatctgtgtaagtgtgtgatgttgttttactacatcacatcctaaaaaatgtgtatttcgttctcctgttataaagtaattatcaatcgcccaatattgcggtttcccatcatctgtataaatccaatcctgcccaactcctgcggtaaaaacagggtgttcgatattaaaaagaaaaattccacctggttttaatgtcctatacactttttgaaatatttccactatgtcctctatatagtgcagagctaaattagatataacacaatcccattcattttctggatagtcatattcctctaatccgctaatacgatattcaatttgatttcctgaattgcgcttttgggcttcctcaatcattttcttacttaaatcgatccctaatatttttgtagctccttgttcttctgcgaacttgcagtgccagccatatccgcaccccaagtcaagaacagattttccttctaacgaaggaaacaaaggttttaattgatgccattcaccagcagcttttaacccctctttactgcgggacatctttgcatattcttcaaaaaacttctcattatcgtattcattattcataaccttaacatctcctattttatccttcggcaccgccgcctccaggcggctccccaacttcatctgctcgataaatgggaattgcaccaaaacaatctaagacaacaatgctgccctacttgcgattttttcttgtactgcggaaacagtttcttgaatggaataattggtcgtatctacaacattcgattcatatattcccagattgcaaaattgctcccacattgtttctaccaattcgatatttgtttttcggtctaactttgagcgttcaacagcccgctttaaggtttcttccttacttgcccttaaaataatataatgcacctcataatgttcccgaacaagactttgccacggctttaaaaaccacggtccgataataccgtcaacaattacatcatatcccccacgagcatatcgcttcgcagcttctaaaaacgcttcaatgacaatcaaattttgctcatttgattctggcaaatgcggtggtattgcccctttactcaaataatgataaaagtcatctgtgtgcatatgcacagacttttccaaatctgattcttttgcaacagcagatgccgttgtagtttttcctgtccccggcgcacctgtgattacaataattctaccttgattcatctatattttacctccacaaattccgatttgttgataactcattatatcataaatttatccactatatcataaatctatccacttttcaatctatatcacgcaattaacttggaaaggaacaccgccgagcaatgggttatctcggcggtcactcttttactcgttgtccgctccatacgataccgacgacggaattccgttatcatttagatttttctcgatatccttcaccggaagtgaggaaaaatacgcttctcttccctcttttattataagctcgtggcacggcttgtttccggcgttgtcgggaatgcgcgcgtccattatgttcacggctatcatctcgggagtaatggcggctctccctccggcttgacctacgcacaccaccgcgtcgggtctgtattgctccaccgcttttttaagaacctctcctgcctttccaaacaccgtcggcacttcgagctttaaaatttccgcgccttgtatttcgtttttcatcatttttacggcttctcccgcaggattgattttctctcccccgaacgggtcaaagcctgtgaacagtattctcattttatcatgcctttctttgtctgtattctctcaaaatctcgcggcacctgttttgaagccactctgttgtctcagtatcgttttcgacagcgttttcgtatatttccgtcagccctatccgcagctcatagcataaaattcgctcggtatatctcggcaggtgagagtattttctctcccaatacgccgcagttttttccatgcacatgagccatgtccgccaaaaatacgcggtcgcgatgtcgtaaagaaagtccccgtaagccgcgcagtcccagtctataacgccacttatcctcgattttttgcctacgataacattattcgagccgaaatccccgtggaacagcgctctttcttccgggcaataagatataagctcacgatatgccgcgagaagctcgtcgatgagtgagaggttaacatagctcctgcttaccgccgtccagtctctctcgaatacctccgcaagatattctctccagctgtaaaacggagcgtttcccgtatcgctgtcaaacacgccgcagccggaagtgcctgatatatcggttcgcgatattgcttcggttacatccgtaatatcgccgagcagtcgcacaaccgtttcttcatcggagtcctcatatgtaatcccgtccgcttttacgctgatgcagaagtagtgcgtgccgtcaaagttgcctgtttcaacaacctctggaataggaactctatccgagcggaagtgctcataggcgtatttgtcttttttgaagccttccatatttgaatttatgcgcacgacatattctctgccgccacgcgaaaaccaatacgcctgtgactcctgcccttcttttatcggaaaaagccttatatcctcaccgtactttcggcttaaaaactctgtgatgctttcttttgaataatcgcttttcatgttccgctctctcctttagctctgtctgaggataatataccacaaaaaagcaaaaaaatctaagacaacaacgctgccctacttgcgattttttcttgtactgcggaaacagtttcttgaatggaataagtggtcgtatctataacattcgattcatatattcccagattgcaaaattgctcccacatggtttctactaattcaacatttgtttttctgtctaattttgagcgctccacagctcgcttcatagtttcttctttactggcccttaaaacaatatagtgtacttcataatcttctcgaacaagggctctccatggttctaaaaaccacggccctacaattccatctacaattacatcatatccaccgcgggcatagcgctttgcagcttctaaaaaggcttcaataacaactaaattttgttcgttggactctggtaaatgcggcggtattgctcctttgcttaaataatggaaaaagtcgtctgtgtgcatatgcacagatttatccatgttcgattcttttgcgacaatcgacgcaattgttgtctttcctgttcccggcgaacctgtaatcacaataattcttccttggttcattttcactcctcctatttcgatttgctgttctctatttctttttccgtccccgctgtgggtttggatttttcggcaagtccaacttctccgcaatctattttagccgcttcttttcttcttcaaacagtttattataccccaaaaccataaatcagcaaacgcaaaaaccgttaccaaagaaaatgccgcctgccttttttgctaaacctaaagaggctaagttagaagtggacgcactatacaaaggaatactaccatttcgtctaactgcttctgcccattctgcaagtgtgtggaatgcatacccttttcttctgtaaagttcagccgtttcaattcccgcttcctctgcctcaagaataatccgaacactacgacaaatagatacgacttgagaatcttccaaataagcagcgcaaaagggaacatccagcaactcttcaggtagccagggaaaatagtggctcatctgaggctcaatgttgtctttagtgagtaagcaggcttttaactttggctgttcaggaagccaaaaacaagcatcttctgaaatcttactttctcctaatagttgccgatattctttatcataaataggtgattcattcggcagcatcagtactggctctctgttggtaattgattgtagtttttctcttaattctttcggtacgtcagcgcgaaaataagcatgtggtttttcgtaaagtggtcttgtcaaatagaagcggggagccggctgtgaagtggagtcccatggttcccttatagtcataagttcgttcttttcattcattgtaaacagtgcttctacatgaagctgcatatagtacgagttgctttttcccattttctaatattctcctacatttatttctctgcctgttcaatcattttctttactaaccgctgaaacaggtcggcggtttcctcgtccatcggtgcaagctgtccgatctgtccggctatcatcgccgttacatcgtcaatggaaagcggtttttgtttctgttccgccagtgcgtcccgcatggcttggaacatagcggcggtcacagcttcccccggctgttccccgttgtcaatatctttcttaatatcccgcaggatagccaggatttgttgctcgatgccagggctttcaatgcccgagttggccggaagcagctggttcttgctggtggaattggtgaggtaattgcggatataccgtgccatggaaagctgcgtgttcaatgccagaatttgcgcattggtctcgctgctctgttccatatacatgctggcagcggcctgtacatcgggcagaaggtgttcgctcttgtaagaggagatgttttcatccacattgccaagttcctgctcaatcacaccgagacggtcactaatgaaagccgaggtactaactgcgatttgattcttgtcctttatccagttctcattgtaaacggctatcaccgtattcagcacatcctccgcccgttggatgcacacgtctttgaatgacagattgatgacagtggatttctcatcactcaacgtaactgacaagttggaagcatagtcgcctgtggcatcttggtatcctctgcgtgagacataaacaggtgaatcatgggtggcggaatcgttcgcaacctttacaacaagttttccgataggggcgtcaactgtgtcattcaacacagccgttatctttcctgccacatcttcaccattacgagaaaaatccgtcagaagtacttggccatcaagaccggggttaatggtaaaagccacgctctcgttgtcttgcaattcgttaaagtctaccgtgtaggggcaatctcgaccatacaagactttcttgtaaaaccctccgtccgtgtgataactgatgtccaaatgaaggcgtttcaccacatcaagcattaccgcaggagactgcaacgattgtatttcattgtttacgttggtgttggtctggaagaggtcgaagtctcccatcagaccagccgcatcacccaatgagttccctttggaatcctctttgataaggagcgatgctgaacgggtatataccggcggggtggtcaaaagatagacgacagccactccgacggtaacagccaacgatatgacgaaccaataccacttgttgagacagaggtagaacaaatcttgtatacggataaagtcatccgcctgtttaggtttggatatattgttttgagttgccacgatatacaatatttagattggacgtgattaattaaaaatgaggatggccacagaagtcagcaacgatgccagcgaaatccagaacgaggtggaacgcacgttgttgccgttgacggtagattgacgggctttcacttcattgggttccacatacaccacgtcattctgttgcagataataggcgggtgaagaatagatgtgttcgccggaagtgaggttcagtccgtacacccgttgcacatccccttcttgccgtaacaccatcaccttggaacggtttccgtagatggtcaggtcgcctgccatgctgagtgcatcgagtatggtcagcctgtcccggtcaatgctgaaacgtcccggactgttcacctcgcccaacacggatatgcagagattggcaaattccacggtcacgacagggtctttcaccaaattctcctttatcaattcgttcttgatacattcggcgatttcttcccgcttcattccggccacgtgtatcttgccaagtacaggaaaatctatcttaccgttggcatctacggtataagcggatactccttgattgcttgaagccgtcacgccatttgtccttaaagactgacccaattgcctggacacataaggcaggttgaacaagtccgtcaactgggggtcacggctgttgacgataatggaaatcttatcctccggtcggactgtaatggctttcacttcaggcaacttgatttctgtttccccgggtctcaaatcctggaaataaactacttccttggaagaaccgcacgagcccagtgtcactgtacttgcgacaatgagcaagatgtaaaatactttatttatactcat

SEQ ID NO: 89 - DNA, 9667 bp, unidentified
  source 1..9667: mol_type = unassigned DNA
atgtgtggaattattggatttacaggtaaattaaaagcccaggatgtcttattgacaggacttgcaagccttgagtaccgtggatatgacagtgcgggaattgcgtactttaaagataccggaaaaatttcacttcggaaaactgtcggaaaagtaaaagatcttcgtgccatctgcgatgatgataacaattctacgtgtggaatcggccacacccgctgggcaacccatggtggcgttaccaatgccaatgcacaccctcataaggtcggacaggttgcattgatccacaatggtatcatcgagaactatcatgatctcgccaccaaatacgatctgacggatgaactgatttccgagacggataccgaagttgccgccgcattgatcaataaactctacgaaggagatccaaaagaagctctgcgcaaagcagtagccgaaattgaaggttcctttgccttctgcgttctgttcaaggatcatccaggtgaaatttatgcggtaagaaatgtcagccctatggttgcaacatactgtaatgacggtgcttttattgcatccgatctgactgcttttatcgcatacaacaagcgttatttcatcgtgccggaatatcatattttaactatgactgcggacggcattacgttagaagatttagacggtcattccgtagaaccggaatatatggaagtaaactgggatgttaccgcagcccagaaagatggttatccgcatttcatgatcaaagaaattcatgaacagccggctgccatcacaagaaccattaccccacgtatcaaagatatgctcccggatttttcggaagatgccattgcggattccttctttgaaaatgtaagcgacattacaatcgttgcctgtggtactgcaatgtacgcgggaatggtaggaaaaaccatgatccagaaccgcctgcatattccggttaccgtggcaatcgcatcggagttccgctatgaagaaccggtaatcaatgaaaaatccatggtgatcgttgtatcccagtccggagaaaccattgatactttggaagctcttcgccttgcaaataaatatacaaagaaaacactgtctattgtaaatgtaaaaggctccagcattgcacgtgaaagcagctatgtattatatacacatgccggtccggaaatcgctgttgcaagtacaaaagcatacaccgttcaggttgcttctttttacctgcttgcatgcaaacttgccatgaaacagcaaaagatttctgtcgaagaagcacgtacatttattggaacactgcaggaaattccaaattacatcgaggaagttcttgcacaggctcctgatattgaacagctgaccaaacgcatgatcaatgccaacaacgcgttctttatcggccgtggactcgattataccctttgcatggaaggtgctttgaaattaaaggaaatttcttatattcatgccgaagcctatgctgccggtgaattaaaacacggaaccattgctctggtcagtgaaggggttcctgtcattgccgctgctacccagaaacatgtatacagcaaagttatttccaatatccgggaagtaaaagcccgtggtgcttatgtcattcttttgtccaaagacaaagaaatcacagatccttctatctgtgatgtacacatcaatcttccggatgtatccgacgaatttacgatttttgaatctgttgtaattttccagctgattgcatattacacatccgttggaaaaggcttaaatccggatcagccacgtaacctggcaaaatctgtaacggtagaataaaaaaactgtcgcgcgaaaattcgtgcgacagtttttttgacatagagcctttctaaaacttttgaaggcaaaaaaagaaccccagaagctctctaaaagcctctgaggttgcccctgccaaggattctctcacccatgtaccggaatccttgtatcgtcggcgcgacaggatttgaacctgcgacctctgcgtcccgaacgcagcgctctaccaagctgagccacgcgccgtttcaactgcccaattatagtaacacattctccggtgtttgtctagtgaatttttttaatttatggtacaatacaaaaaaagaatggagaagaacaatgaaacatactgctttgattacaggtgcatcccgtggaatcggtgcagccctggcatgtcgatttgccgccgaaggctatcatctggctctttgctgccataactcttatgaaacgctgcaggcacttgccacaaaacttgaaacaacctactccatacaggtgctttgcttccgtggtgatgtaggagactatacttttatctgtgacatggtgcaaaaaacactggataccttcggccagattgatgtgttaatcaacaatgccggcatctcttatatcggtctgctcaccgacatggatattaccgactggaaccggattattgcgacaaacctcacatccgtcttttccacctgcagacaggtcatcccctccatggttcatgccaaatccggacatatcatcaatatttcttctgtatggggaaatgtcggagcttcctgcgaagttgcctattctgcatgcaaaggcgggatcaattcccttacacgcgctttgggcaaagaacttgcccctagcaatatccaggtaaatgccatcgcctgtggggtaatcgatacggatatgaaccgttgtttctccgaggaagaacgctctgcactcatcgaagaaattcctgccggccgtatgggatccccggaagaagttgcttcactggcatattctcttgccacagcaagcagttacctgaatggacagattctcaccttagacggtggatggatttaatttcttatctctttggaaatctttttccatttatttaagaattaaaacgcaatacgcgttttctctgttttttatatcaactttctataaaatcatttgtatgaaaacgaatgataaaaataaatacaaagattttggtgaccgtctgagtctgattatgtataaacaaaatatttccaatatccagctggcaaatgcaatgtttgtttcgccgtccacgatcagcggataccgtaccggtcgtcgttctccgaccgttgcggatcttgcagccatcgtgcagattctgaatgtttctgcagattacctcatcggaaccagtgaaattacaaccagacccgataccaccgaaaaaaagagttgagcacgccctgtttccagagcggtgctcaactcttttttataaatcatgttctgccagtaaaattaccgtagaacgttccggaacacgcacacgtgtctgatctccctgtgtctgggcttcaaaatctgccccatcctggtattcacagaaagtatttactacaagtttccaatgataagactccggcaacgaaggcaggcgcatctccaaaggctcccaatacgcattcattccgtaaaagatcatatcatcatccgtatcatcggcatttcttcccgcatacatgattccaattaaatgtgtattatagtccgtataattccggttcggctctccgttatggatacttacggaaggtaacccgcagactgccggctttgtatcccttcgcagaatcggatgctttgcacggaaatggatcataaaacgggcaaaatcatgaatctcctgaaattcttccagtctgttccagtccagccaggaaataatattatcctggcagtatgcgttgttatttccatactgcgtattacaaaattcatcccctgcaaaaaacatagccggtccacggctgcataacaacgcggcaaatgcattcttcacgagtctgcgtcgcaggctcataaccgccggatcatccgtctcaccttccaccccgcagttccagctcaggccgttgttatccccgtccgtattgttccatccgtttttctcattatgcttttcattatatgaatacagatcatacaacgtgaacccatcatgacaggtcagaaaattgacggatgcactatatccgcggcttgccggatcatacatgtcggaggatccggtgatacgtgtaattgcacgccctgcgacgccactgtcgccctttaaaaagcttctcatatcatcacggtatcttccgttccattcggcccagcggttccatgacggaaaacttccaacctgatacaagccacccgcatcccaggcttctgcgatcagcttcatatcccccagaatagagtcaaatgcaagggcttccagaatcggcggattctccatcggtgcaccattctgatctcttcccagaatcgatgccagatcaaaccggaatccatccacacggtactctactgcccagtgccgcagacaatccgtaataaacctccgaaccaccggatggttgcagtttaagacattgccacagccgctgaaattataataatatccatccggtgtaagcatataataaatattgttatcaatccccttaaagcaaaaacatggaccgtcttcatttccctctgccgtatggttgaataccacatcaagaatgacttcaattccattttctttcagttcgcggatcagacgctttaattcatcaccctcatgattatgctcctgatgaaatgcataacttgtattcggggcaaaaaaggaaaccgtattatagccccagtaattgtacaactgcacgccatccaccacacgggcactttccatttcatcaaattcaaaaatcggcatgagttctaccgcattgattcccagatctttcaaatacggaattttctgtcgcagaccttcaaatgttcccccaccttttacaccggaggacgcatctttggtaaatcccctgacatgcatctcatagatcaccagatcttcaaatttgtaattcagattccgataccgcccccagtcaaaatcactttgcaccacacgggctttatagacaaaatcctttccgccttccggtttttctccccagtttctctgaccggtaacagctttcgcatatggatcaagaagcgtatgttttctgttaaacagtaaccctctcgcctgatcggcaggaccgtccatctgataggcatactcaaaatcctctgcttttaagccaaaaacaaggatagaatacgtatttccaattttataactttccggaatgcggattcttgcatacggttcctgtgccgccggccggaataacagcaggacacagctcgtagctccatgggagcttacggtaaaacttaccccttcctctgtctgatatgcaccattcatctgataaaatcccggacgtacatcaaatccaccgatattatcgagtggatgaatgacttccccgagactttccatttcttcgtctatcggccagcttttctgttttgacggataattccaaaaacttgcattcatgtgctgattcctcttatcattattatttacttgccacataaaattatattatccccctactcttccctgatgattaccctgccatttgcgtcaaatccgattttactgtacttttccgaatactcattcatatgatcaataatcgtctgttttctgtcgccttttgctatggcaggctgaaaattatttctttctgatgtggaagaaatgctgcatggtatcatatcggctgatatatctgtctgcagtaccccatccacaaaggtaaaggtctgttcatagatcgccgtatctttgtcttttggattcctgttccccccaaagcagaaatttccaagactgtagcagatcatttttccgttgtataattccattccctgcaatacatgaggatgtgtaccgaccagcagatctgctccccagtcaatcacctggtgtgccagcttctgctgataatcattcggataatgatccccctctatcccccagtggcaacaggcaattaccagatccgctccttcttcccgaagttctgcaatcccatcccggatataattggcatgtgtttcatcagcggacagctggcttgcggagacaattccgattttgataccatccttcgtggtataggtatccacatgatcattgaatccgaagataatccctgctttatttaacacttctctggtatcatcaagtccctgctgcccataatcaaacgtatgattatttcccagacttgccccctccacagaactgtctgtcataataccaacatactccggttttccttttaagttccacgttttttccacacgctcggtcgcatttgacaacacacattccagattgatcagtgtaaaatcatcctgctcaaaaatacttctgatatttttaaaaaaataatcctgcccgtatttatcatagtattcatgaaaggaacctgcatacccatgcgtctgtgttgccccaagcgtacagtcacctgtcgccgtaatttttaccgtctgtatcaccggttcctgctgcgtttcagttgcagtcccggtttccgtttcttccagcgtacccggttcttccgtcatctgtgtctccgtgattttttccgtagaagagggcaaagccgatgacgttgctgcaggagaagaacatcccgtcagcaaaaatcctgccattaggattggcaatatccattttttcatacgttttcagactcctctttcacaagaatatccaccgtgtgaccgcttgcacccataagatccatccgttcacaggttgccagatgatactgcagaaacgcatcaaactcttcttccgtcagcgcatttaaaaacggacgcatataatttgctgcaccgtctgccgctatgatctgccggcgcctgacctctacctgccggtccaatgcttcaatatcttccagacgaaccatggaatacagaggattggcttttgaagtacagtgataatcctctgtgagcattccctcctgaagcgcctccagaatatgtttttccttaaacgcatacgtgataacggaaaattcattcataatatacgccacgagaatcctgcctccgggtctggtcaccctcaccgcctcccgcagcgcagcaagcttgtccttttcctcatgcaggtgatacatcggcccaaacaacagggttacgtcaaaggaatcatcggaaaattttttcagattcattgcatttccctgatatgcatgcactcctgcacccttctgtttcaggcgtcccagattatgctttaccagttccacggccgtcacatcgaacccttcctgtgccagcggtacgctgtatcgtccggttcccgccccgatatcaaggatatggattttctcttttgcacgttctttcacaatttcatccagacactgatggatataatgcatgcttgtcacaaattccaccctgccgtgtcggctgtccagacgcttctcttcattaaatttattataataggcttctaagtctgtcatattttaatactaacacattttctttaaaatttcactcacaatcgctgatgcgacatccgctttgctcattatttccagttccctgcagtcatctgccgtaatcagcgtcaccacattggtatctgtaccaaatccggctccggctaccttcaggttattcgccacaatcatatctgcattcttttttgcaagttttgcacgggaattctccagcatatgttccgtctccatggaaaatccacacagaaactgtcccggttttttgtgcgcgcccagatacgaaaggatatcttccgtgcgttccatcgtaagagtggcatccccgtcttttttcttgactttttcatcgaccgggtgatccggacgataatccgccacagctgccgctttgataataatatcctgttgctctgctgtctcctttacggctgctgccatatccgcggcagatacaaccggaacgacctttacaaacggcggcggagtgattgccaccggtcccgtgatcagcgtcacttccgcgccacggcgcatacagttttccgcaattgcatagcccatttttccggtagagtgattcgtaatataacgcaccggatcaatcttctcctgtgtcggtcctgctgtgaccatcactttctttccgaccatgtccttttcgcaggcaagatctttcataatataagaaaacagtgtttccggttccggcattttcccggctccggtatccccgcaggcaagataaccactcgccggatcaatgatatgaaacccataatgctccagctttttgatgttatcctgtacgatcggattttcaaacatattggtattcatggcaggggaaacatacttcgggcattttgccgcaagaatcgttgttgtcagcatatcatctgcgattccgtttgccatcttgccgatcacattagcagaagccggtgctaccataaaaatatctgcacgctttgccagtgccacatgctcgacattgaactggaaattccggtcaaacgtatcgaccagacacttgttgcttgtgagcgtctcaaacgtgataggattaataaaattggttgcattttccgtcatgatcacatgcacatccgcatgctgcttgacgagcgcacttgccagataggcgattttataggcagcgatacttccggtcacaccgagtaccacacattttccttttaacattgtctcttactcctttgcagaaaaaatcacatcttctgctattttatcacactttttccctaaaacaatttaatttttgtcatctgttccagtatggaatctttgacagaatcgttcagatatgctggatttaattttctttttgcatatgcaaggtaagaaccatttgtctcttcaatcaaaactgccgtaaaaaaccgctcccagctaaaatatgttttgctttccacatattcccacggcttttccagcacctgatctgcccatttgctttttactacttttgcctttaatatcagccattcaaatgactccggcaaataaagcaccacttgatcttttccacccatcaactgcatcactctgtcaatttcagaaccaaatgccgcaccgtctgcaattacaagtatgcgttcatttttatgcatatttaaataatggaaaacatttgactttccattcattgtctcacatttcaattgctgttgcctacatacagaattaaaaaactgataaccggaattactgtcttccgttattacaacctctggtttaatatccttctttaaagtctgtgctccatatattctgtaaaactcatgataacacggttttaatgttccgtattttcctgaagtacgaattccatagatttcctccacactatacggcaaagaaggcaaggattccctggaaacaatgacataataattatctgttttctgaatagtatctgcgaattctactgtcttgataaattcgtttccttcatcaataaatacaatactatcctgcattgctgataactgttctttccacagtgaaccttcgagcacataacattttttgtcacacgtcagttccacgggcgtaccggatggattatttacgtattcccgaatcatatctaccaatgtggttttgcctgtcgcactgtctccccggatgaccgtcagatttcttcgaatttcaaaatcatattttaagcgctttgttgatacaataattctatgttttcccttcat

SEQ ID NO: 90 - DNA, 9739 bp, unidentified
  source 1..9739: mol_type = unassigned DNA
atgaaaaatattctgatgaacgaaaacaatatcgggatcataaaattatatgagaaaaaggagatttcaattatgtgtggaattattggatttacaggtaaattaaaagcccaggatgtcttattgacaggacttgcaagccttgagtaccgtggatatgacagtgcgggaattgcatactttaaagataccggaaaaatttcacttcggaaaactgtcggaaaagtaaaagatcttcgtgccatctgcgatgatgataacaattctacgtgtggaatcggccacacccgctgggcaacccatggtggcgttaccaatgccaatgcacaccctcataaggtcggacaggttgcattgatccacaatggtatcatcgagaactatcatgatctcgccaccaaatatgatctgacggatgaactgatttccgagacggataccgaagttgccgccgcattgatcaataaactctacgaaggagatccaaaagaagctctgcgcaaagcagtagccgaaattgaaggttcctttgccttctgcgttctgttcaaggatcatccgggtgaaatttatgcggtaagaaatgtcagccctatggttgcaacatactgtgatgacggtgcttttattgcatctgacctgactgcttttatcgcatacaacaagcgttatttcatcgtgccggaatatcatattttaactatgactgcggacggcattacgttagaagatttagacggtcattccgtagaaccggaatatatggaagtaaactgggatgttaccgcagcccagaaagatggttatccgcatttcatgatcaaagaaattcatgaacagccggctgccatcacaagaaccattaccccacgtatcaaagatatgcttccggatttttcggaagatgccattgcggattccttctttgaaaatgtaagcgacattacgatcgttgcctgtggtactgcaatgtacgcgggaatggtaggaaaaaccatgatccagaaccgcctgcatattccggttaccgtggcaatcgcatcggagttccgctatgaagaaccggtaatcaatgaaaaatccatggtgatcgttgtatcccagtccggagaaaccattgatactttggaagctcttcgccttgcaaataaatatacaaagaaaacactgtctattgtaaatgtaaaaggctccagcattgcacgtgaaagcagctatgtattatatacacatgccggtccggaaatcgctgttgcaagtacaaaagcatacaccgttcaggttgcttctttttacctgcttgcatgcaaacttgccatgacacagcaaaagatttctgtcgaagaggcacgtacatttgttggaacactgcaggaaattccaaattacatcgaggaagttctagcacaggctcctgatattgaacagctgaccaaacgcatgatcaatgccaacaacgcgttctttatcggtcgtggactcgattataccctttgtatggaaggtgctttgaaattaaaggaaatttcttatattcatgccgaagcctatgctgccggtgaattaaaacacggaaccattgccctggtcagtgaaggggttcctgtcattgccgctgctacccagaaacatgtatacagtaaagttatttccaatatccgagaagtaaaagcccgtggtgcttatgtcattcttttgtccaaagacaaagaaatcacagatccttctatctgtgatgtacacatcaatcttccggatgtatccgacgaatttacgatttttgaatctgttgtaattttccagctgattgcatattacacatccgttggaaaaggcttaaatccggatcagccacgtaacctggcaaaatctgtaacggtagaataaaaaaactgtcgcgcgaaaattcgtgcgacagtttttttgacatagagcctttctaaaacttttgaaggcaaaaaaagaaccccagaagctctctaaaagcctctgcggttgcccctgccaaggattctctcacccatgtaccggaatccttgtatcgtcggcgcgacaggatttgaacctgcgacctctgcgtcccgaacgcagcgctctaccaagctgagccacgcgccgtttcaactgcccaattatagtaacacattctccggtgtttgtctagtgaatttttttaatttatggtacaatacaaaaaaagaatggagaagaacaatgaaacatactgctttgattacaggtgcatcccgtggaatcggtgcagccctggcatgtcgatttgccgccgaaggctatcatctggctctttgctgccataactcttatgaaacgctgcaggcacttgccacaaaacttgaaacaacctgctccatacaggtgctttgcttccgtggtgatgtaggagactatacttttatctgtgacatggtgcaaaaaacactggataccttcggccagattgatgtgttaatcaacaatgccggcatctcttatatcggtctgctcaccgacatggatattaccgactggaatcagatagttgcgacaaacctcacatccgtcttttccacctgcagacaggtcatcccttccatggttcatgccaaatccggacatatcatcaatatttcttctgtatggggaaatgtcggagcttcctgcgaagttgcctattctgcatgcaaaggcgggatcaattcccttacacgcgctttgggcaaagaacttgcccccagcaatatccaggtaaatgccatcgcctgtggggtaatcgatacggatatgaaccgttgtttctccgaggaagaacgctctgcactcatcgaagaaattcctgccggccggatgggatccccggaagaagttgcttcactggcatattctcttgccacagcaagcagttacctgaatggacagattctcaccttagacggcggatggatttaatttcttatctttttggaaatctttttccatttatttaagaattaaaacgcgatacgcgttttctctgttttttatatcaactttctataaaatcatttgtatgaaaacgaatgataaaaataaatacaaagattttggtgaccatctgagtctgattatgtataaacaaaatatttccaatatccagctggcaaatgcaatgtttgtttcgccgtccacgatcagcggataccgtaccggccgtcgttctccgaccgttgcggatcttgcagccatcgtgcagattctgaatgtttctgcagattacctcatcggaaccagtgaaattacaaaaagacccgataccaccgaaaaaaagagttgagcacgccctgtttccagagcggtgctcaactcttttttataaatcatgttctgccagtaaaattaccgtagaacgttccggaacacgcacacgtgtctgatctccctgtgtctgggcttcaaaatctgccccatcctggtattcacagaaagtatttactacaagtttccaatgataagactccggcaacgaaggcaggcgcatctccaaaggctcccaatacgcattcattccgtaaaagatcatatcatcatccgtatcatcggcatttcttcccgcatacatgattccaattaaatgtgtattatagtccgtataattccggttcggctctccattatggatacttacggaaggtaacccgcagactgccggctttgtatcccttcgcagaatcggatgctttgcacggaaatggatcataaaacgggcaaaatcatgaatctcctgaaattcttccagtctgttccagtccagccaggaaataatattatcctggcagtatgcgttgttatttccatactgcgtattacaaaattcatcccctgcaaaaaacatagccggtccacggctgcataacaacgcggcaaatgcattttttacaagcctgcgccgcaggcccataaccgccggatcatccgtctcaccctctgccccacagttccagctcatgccgttgttatccccgtccgtattgttccatccgtttttctcattatgcttttcattatatgaatacagatcatacaacgtgaacccatcatgacaggtcagaaaattgacggatgcactatatccgcggcttgccggatcatacatgtcggaggatccggtgatacgtgtaattgcacgccctgctacgccactgtcgccctttaaaaagcttctcatatcatcacggtatcttccgttccattcggcccagcggttccaggacgggaaacttccaacctgatacaagccacccgcatcccaggcttctgcgatcaacttcatatcccccagaatagagtcaaatgcaagggcttccagaatcggcggattctccatcggtgcaccattctgatctcttcccagaatcgatgccagatcaaaccggaatccatccacccggtactctactgcccagtgccgcagacagtccgtaataaacctccgtaccaccggatggttgcaatttaagacattgccacagccgctgaaattgtaataatatccatccggtgtaagcatataataaatattgttatcaatccccttaaagcaaaaacatggaccgttttcatttccctctgccgtatggttgaataccacatcaagaatgacttcaattccattttctttcagttcgcggatcagacgctttaattcatcaccctcatgattatgctcctgatgaaatgcataacttgtattcggggcaaaaaaggaaaccgtattatagccccagtaattgtacaactgcacgccatccaccacacgggcactttccatttcatcaaattcaaaaatcggcatgagttctaccgcattgattcccagatctttcaaatacggaattttctgtcgcagaccttcaaatgttcccccaccttttacaccggaggacgcatctttggtaaatcccctgacatgcatctcatagatcaccagatcttcaaatttgtaattcagattccgataccgcccccagtcaaaatcactttgcaccacacgggctttatagacaaaatcctttccgccttccggtttttctccccagtttctctgaccggtaacagctttcgcatatggatcaagaagcgtatgttttctgttaaacagtaaccctctcgcctgatcggcaggaccgtccatctgataggcatactcaaaatcctctgcttttaagccaaaaacaaggatagaatacgtatttccaattttataactttccggaatgcggattcttgcatacggttcctgtgccgccggccggaataacagcaggacacagctcgtagctccatgggagcttacggtaaaacttaccccttcctctgtctgatatgcaccattcatctgataaaatcccggacgtacatcaaatccaccgatattatcgagtggatgaatgacttccccgagactttccatttcttcgtctatcggccagcttttctgttttgacggataattccaaaaacttgcattcatgtgctgattcctcttatcattattatttacttgccacataaaattatattatccccctactcttccctgatgattaccctgccatttgcgtcaaatccgattttactgtacttttccgaatactcattcatatgatcaataatcgtctgttttctgccgccttttgctatggcaggctgaaaattatttctttctgatgtggaagaaatgctgcatggtatcatatcggctgatatatctgtctgcagtaccccatccacaaaggtaaaggtctgttcatagatcgccgtatctttgtcttttggattcctgttccccccaaagcagaaatttccaagactgtagcagatcatttttccgttgtataattccattccctgcaatacatgaggatgtgtaccgaccagcagatctgctccccagtcaatcacctggtgtgccagcttctgctgataatcattcggataatgatccccctctatcccccagtggcaacaggcaattaccagatccgctccttcttcccgaagttctgcaatcccatcccggatataaccagcatgtgtttcatcagcggacagctggcttgcggagacaattccgattttgataccatccttcgtggtataggtatccacatgatcattgaatccgaagataatccctgctttatttaacacttctctggtatcatcaagtccctgctgcccataatcaaacgtatgattatttcccagacttgccccctccacagaactgtctgtcataataccaacatactccggttttccttttaagttccacgttttttccacacgctcggtcgcatttgacaacacacattccagattgatcagtgtaaaatcatcctgctcaaaaatacttctgatatttttaaaaaaataatcctgcccgtatttatcatagtattcatgaaaggaacctgcatacccatgcgtctgtgttgccccaagcgtacagtcacctgtcgccgtaatttttaccgtctgtatcaccggttcctgctgcgtttcagttgcagtcccggtttccgtttcttccagcgtacccggttcttccgtcatctgtgtctccgtgattttttccgtagaagagggcaaagccgatgacgttgctgcaggagaagaacatcccgtcagcaaaaatcctgccattaggattggcaatatccattttttcatacgttttcagactcctctttcacaagaatatccaccgtgtgaccgcttgcacccataagatccatccgttcacaggttgccagatgatactgcagaaacgcatcaaactcttcttccgtcagcgcatttaaaaacggacgcatataatttgctgcaccgtctgccgctatgatctgccggcgcctgacctctacctgccggtccaatgcttcaatatcttccagacgaaccatggaatacagaggattggcttttgaagtacagtgataatcctctgtgagcattccctcctgaagcgcctccagaatatgtttttccttaaacgcatacgtgataacggaaaattcattcataatatacgccacgagaatcctgcctccgggtctggtcaccctcaccgcctcccgcagcgcagcaagcttgtccttttcctcatgcaggtgatacatcggcccaaacaacagggttacgtcaaaggaatcatcggaaaattttttcagattcattgcatttccctgatatgcatgcactcctgcacccttctgtttcaggcgtcccagattatgctttaccagttccacggccgtcacatcgaacccttcctgtgccagcggtacgctgtatcgtccggttcccgccccgatatcaaggatatgaatttcctcttttgcacgttctttcacaatttcatccagacactgatggatataatgcatacttgtcacaaattccaccctgccgtgtcggctgtccagacgtttctcttcattaaatttattataataggcttctaagtctgtcatattttaatactaacacattttctttaaaatttcactcacaatcgctgatgcgacatccgctttgctcattatttccagttccctgcagtcatctgccgtaatcagcgtcaccacattggtatctgtaccaaatccggctccggctaccttcaggttattcgccacaatcatatctgcattcttttttgcaagttttgcacgggaattctccagcatatgttccgtctccatggaaaatccacacagaaactgtcccggttttttgtgcgcgcccagatacgaaaggatatcttccgtgcgttccatcgtaagggtggcatccccgtcttttttcttgactttctcatcgaccgggtgatccggacgataatccgccacagctgccgctttgataataatatcctgttgctctgctgtctcctttacggctgctgccatatccgcggcagatacaaccggaacgacctttacaaacggcggcggagtgattgccaccggtcccgtgatcagcgtcacttccgcgccacggcgcatacagttttccgcaattgcatagcccattttcccagtagagtgattcgtaatataacgcaccggatcaatcttctcctgtgtcggtcctgctgtgaccattactttttttccgaccatatccttttcacaggcaagatctttcataatataagaaaacagtgtttccggttccggcattttcccggctccggtatccccgcaggcaagataaccactcgccggatcaatgatatgaaacccataatgctccagctttttgatgttatcctgtacgatcggattttcaaacatattggtattcatggcaggggaaacatacttcggacattttgccgcaagaatcgttgttgtcagcatatcatctgcgattccgtttgccatcttgccgatcacattggcagaagccggtgctaccataaaaatatccgcccgttttgccagtgccacatgctcgacattgaactggaaattccggtcaaacgtatcgaccagacacttgttgcttgtgagcgtctcaaacgtgataggattaataaaattggttgcattttccgtcatgatcacatgcacatccgcatgctgcttgacgagcgcacttgccagataggcaattttataggcagcgatacttccggtcacaccgagtaccacacattttccttttaacattgtctcttactcctttgcagaaaaaatcacatcttctgctattttatcacactttttccctaaaacaattgaatttttgtcatctgttccagtatggaatctttgacagaatcgttcagatatgctggatttaattttctttttgcatatgcaaggtaagaaccatttgtctcttcaatcaaaactgccgtaaaaaaccgctcccagctaaaatatgttttgctttccacatattcccacggcttttccagcacctgatctgcccatttgctttttactacttttgcctttaatatcagccattcaaatgactccggcaaataaagcaccacttgatcttttccaccaatcaactgcatcactctgtcaatttcagaaccaaatgccgcgccgtctgcaattacaagtatgcgttcatttttatgcatatttaaataatggaaaacatttgactttccattcattgtctcacatttcaattgctgttgcctacatacagaattaaaaaactgataaccggaattactgtcttccgttattacaacctctggtttaatatccttctttaaagtctgtgctccatatattctgtaaaactcatgataacacggttttaatgttccgtattttcctgaagtacgaattccatagatttcctccacactatacggcaaagaaggcaaggattccctggaaacaatgacataataattatctgttttctgaatagtatctgcgaattctactgtcttgataaattcgtttccttcatcaataaatacaatactatcctgcattgctgataactgttctttccacagtgaaccttcgagcacataacattttttgtcacacgtcagttccacgggcgtaccggatggattatttacgtattcccgaatcatatctaccaatgtggttttgcctgtcgcactgtctccccggatgaccgtcagatttcttcgaatttcaaaatcatattttaagcgctttgttgatacaataattctatgttttcccttcat

SEQ ID NO: 91 - DNA, 5735 bp, unidentified
  source 1..5735: mol_type = unassigned DNA
ctattcagtcttctccttcaggtattcataaaaagtatattgtgaacgtactttttccttttgtggatgagctgatttccaacagttacgcagattctcatctacaaaacaggctttacgcttatctgagagctggatagaaagcatatctatcagttcctgctttgcatccgggtccagtatgggggtgacggcctcgatgcgacggtacaggttacgccgcatccagtccggtgagccgaggaatagtttcggatttcctccattaccgaaataccatatacgtgcgtgttccagaaatgtatccacaatacgtgtgacacgaatgttacgactgtatgtttgccccggtatcaggcagcagatgccacggacgatcaggtctatttccacaccggcttgcgaggcttcatacagacggtttatcatggtaggatcttgcagtgcattcatctttagtatgatgcgaccggcttttccttttttcgccagctccatttcatgatcaatcagacggttcagttccggtatcaggttaaaacgggctaccagtaagcggtggaacttcagattctctttaccttgcagggtacggaacaagttgtacagatcgttcacgatgatccggttacaggtaaatagaccactgtctgcgtagagcgtagcagtcttttcattgaagttaccggtgctgatataggcataactggttagttttttcccttctgcgtcgcgccgaagaacgagggcaaccttggcatgtacctttaatttaggaatactatatatgatattaatgcccgaagctttcatcatttcagcagtggcaaggttgttttcttcgtcgaagcgggctttcagttccacaaaaacagtaacctttttgccattctgtgcggcggctatcagagtgttgattacagctgagttctcggcaacccggtattgtgttaccatgatttcacgcacggtaggttcgtgtacggcttcgtacaggaagtggatgaaatgttcgaatgaatggtaaggataatgtagtagcaaatcctttttctccacatagcggaatatggattcccgttcatcaaggcaggtcagtttcatcggttgcggcttccgtatagggtgtatattggggttgggattaggcaaatggcgtaagtcttccaggttgaggtgcttgtctcccggaaccaactcgcggcggtcgatatggaaagcgtctaccaggaaatcaagaaaatcctgcggcatggcacggtcgtacacaaagcggcatacatctcctatcttgcgtttctttactttagtctttacctgttcgatgatttcggaagtgttggcggcatcgtctatcagtatatccgcatcgcgagaaatcttgatgcaataactgctttctacatcatagcccgggaagataacatccagattagccttgatgatatcctctatgaacatcagataatagttgtttcctactttgggcaactctatgaaacgtggaactttgctgtacggctgtttcattacgaaatattgcgtacgtcccggagcaccgggtggcaatcctttctgttgaagacggacggcaagatacagacggttgtcgcgcagaaatgaaatgaccttgtccttggacaccggcacaggttgcaggaacgggaaaatctcttcccggaagaaacgacgtacgaagtcgtgatggaagggttccacatttcggctctgatagaaaatgatatgatttttcttcagggcaggaagtatcttttgctcgtagatacggatacggtcctccatttggcggtttacttcaaggtttatcgcatccaccagttcgatggtagactgtacggtttcctcgtcactttgtgcagcaccggtagctattgctttatggtcggcaacgcgtattttgtagaattcttccaggttggaagaataaatggatataaagttaatgcgttcatacagaggcaaggtgtcatcttccgcttccaacagaacacggtaattgaatgacagccaactaatgtcccgtttaaaatattgatattggttttccatactcatcaagattttcccaaatatagttacctttgcacagataaacaaaagaaagatgacaaaagttggtttattatccgatacacacggatattgggatgaaaagtatctgcaatatttcgaaacgtgtgatgaaatctggcatgccggtgacatcggttcgctggaagtggcgcagaagttggcggcattccgtcctttccgtgccgtgtatggcaacattgacgggcaagacatccgtcaggtctatccgcaaatcaatcgttttactattgacggtgccgaagtgttgataaaacatattggcggctatccgggcaattacgatccttccatacggggaagcattctggtgcgtccgcccaaacttttcattagcggacattctcatatattgaaagtgaagtatgacaaaacactggatatgctgcacatcaatccgggtgccgcaggtatttccggattccataaggtacgcacaatggtccgtttcattgttgacaatggagtgttcaaggatcttgaagtaatagagttggcaggttgagaaagctcctaaaaataaattaaattattttgtactacatttgctttgcattatctttgcggcttgaatagcaaattgagagccgtggggcttggtcctccttcttattttattctatatttgtatcaaccgaaaaaagaactgaaatatgaaaggaattattcttgccggtggtagcgccacccgcctttaccccttatcaaaggctatttccaagcagattatgccggtttatgacaagccgatgatttactatccgctttccacgcttatgttggcggggatacgcgaagtgttgattatttccactccacgtgacttacccatgtttcgcgaattgctcggtacgggtgaagagctcggaatgtccttctcttataagatacaggagaaacctaacggactggcacaggcttttgtcctgggtgccgagtttttgaacggtgaaccgggatgtcttatcctaggtgataatatgttctacggtcagggcttctctgctatgttgaagcgtgccgcttcgatagaaaaaggcgcatgtatcttcggctattatgtaaaggacccacgtgcctatggcgtggtggtattcgatgccgacggcaaagccatttcgctcgaagagaagcctgcgcaacccaaaagcaactatgccgtgcccggtctttatttctatgactctactgtcactgccaaggctgccgctttgaaaccatctgcccgtggcgaatatgaaatcaccgatcttaaccgcttgtatctggatgaaggcactctgaaagtagaaatcttcggccgtggtttcgcatggctcgatacgggtaactgcgacagtctgctggaagcaagcaactttgtggctaccatacagaaccgacaaggtttccgcgtcagctgtatcgaagaaatagcctggcgcaaaggttggatagatgccgatcagttatatcgtcttggtgaacaactcggcaaaacggaatacggtacatacctgatggaacttgccaattctcaccgttgagaaaatcataaattataaattataaatcataaatcaatgaagacttatctcgtaaccggtgcagccgggtttattggcgcgaattatatcaagcacattctggcaaagcatgatgatgtcaagcttgtgatactggatgctttgacttatgccggcaacctcggtaccatcgccaaagacattgatgatgaacgttgtatctttgtgaagggtgacatttgcgaccgtgtattggctgacgaactgtttgccaagttcaaattcgactatgtggtgaactttgccgctgagagtcatgtagaccgcagtattgaaaatccgcagcttttcctggttactaacattctgggtacgcagaacctgctggatgcagcgcgtcgtgcctgggtgacgggtaaggatgaaaatggttatcctacctggcgcaagggtgtacgctatcatcaggtttctaccgatgaagtgtatggctcattgggtgccgaaggatacttcacagagcaaactccgctttgcccgcacagtccttacagtgcttccaaaacaagtgccgatatggtggttatggcttatcatgatacgtataagatgccggtaaccattacccgctgctccaataactacggtccgtatcatttccccgaaaagttgattccgctgattatcaagaatattctggaaggaaagaagcttcctgtttatggtgacggtagcaatgtgcgcgactggttgtatgtggaagaccactgcaaagctatcgacctggtagttcgcgaaggcgtagaaggtgaagtctacaatgtaggcggtcataatgaaaagaccaacctcgaaatcgtgaagttaactattgccactatccaccgattgatgacggagaaaccggaatatcgtgaagttctgaagaagaaagtgaaggatgaagacggtcagattgatatcagctggattaatgaagacctgataaccttcgtgaaagaccgtctcggccatgaccagcgatatgccattgatccggcaaagatcactgccgctttaggctggtatcccgaaacgaaattcgaagacggtatcgtgaagactatcgagtggtatctgaataatcaggactgggtggaagaagtaaccagcggtgattatcagcactattacgagaagatgtacggaaagagatgatgttagtgattaacggttagtgattgctattataacactaagaagaatccccataaacagcatattgcgcgaagtctcgcccagtatgctgtttaattttttaccgcttcgtatctttaccatgcgtttccaggtagttacgtggaaataaaggtaggtgaaaggcatgaagatacctgcatagttccagccttgggcaaaccagaaggaaagcaatgtcgcgatgatgccgagccagaggtaaaggtatctgccgaaaggttctccgaaacggacgatgagcgtacgttttccgctgagggcatcctgatcacggtcgcgataattgttcacaactaataaggtatctattaccagtccgctgatgagcgaagcaatgatgacgtttggggtgaatgtatatgcctgcacatagtatgtgccgcctaccggaacaaagccgaagaatatcagcaccagtaagtcgccccaaccttgataggagaggacggtggtatataggaaggcaaatattacgcagaatactcccagcacaatgagttcccatcctccgtgaggcagttctccccaacttgtgtatagcaatccgagaccggaaatgcaggacaaaatgacgatgacaccgattcccactttcatggctcccggtgtaatccagccttgtgcgcaggcacgttccgggcccaggcggtcggtacggtcggtacctttcaggaagtcgaagaggtcgttgatgaagttggcggcgatctgcataccgcaggcaaagagcatacacagcagagcgggaacaattttgaattgtccgtcggcaaatgccagtgaagtacctatcatcacaggaatgatagctcccgtcaaggttttgggacgggctgcaaggagccatgcatggggggaattctgtttgatctctttcat

SEQ ID NO: 92 - DNA, 11882 bp, unidentified
  source 1..11882: mol_type = unassigned DNA
ttactggttcaccgcttcaataatgatctttgccatatagtcgatcatctcatcggtcatgccggggtacacgccgacccagaaggtgttgttcatgataaagtcagtgttggtcagctcccctgccacgcggtaggcgtcggtgccgcggatctggtcaaagcaggggtgcttgatcaggttgccgctgaacagcaggcgggtctggacattgtggtcctcaatatagcgggtcacggcgttgcggtccaggccggattccggcttgaccgaaatcaggaagccgaaccaggacgggcggctgttggcggccggttccggcaggatcagcttatcggcagccggttccagggctgcgcgcaggcggtcccagttatggcggcggcgctcgataaagctggggaactttttcagctgttcgcagccgatggcggcctgcatatcggtcactttcaggttatagccaaagtggctgtaaacgtacttgtggtcatagcctgcgggcagttcgccatactgaccgtcaaagcggtggccgcagaagttatcatggccggacgggcagatgcagtcgcggccccagtcgcggtagctcttgatcaggcggttcagcagcgggctgtttgtatacacgcagccgccctcgcccatcgtcatgtggtgcggcgggtagaagctggaggtgccgatatcgccccaggttccggtaaagcgggtttcgccgttgatggtgtactgggtgcccagggcatcgcagttatcctccaccagccagaggttatgagcatcgcagaaggctttgacggcggacaggtcaaacgggttgcccagggtatgggcgatcatgactgccttggtcttgggggaaagagcggcttccagcttggtcacatcaatgttgtactgcggcacggtcacatccacaaacaccggcacagcgccatactgcagcgccggggtgacagtggtggggaacccgcatgccacagtgatgatctcatcgccctttttgatctggcggtcacccagttccggggcggtgagcgccataaaggcaatcaggttggcggaggagccggagttgaccaggttggcgaactttacgccgatccacttggcaaactctttttcaaattcatccgcaaagcggccggtggtcagccagaaatccagcgttgcatcggtcagggcgcacatttctttttcatcaaacacgcgggatgcataagtaacgcggtcgccgggcttgaaatccgcctttttctccttaaagtcatggtaatattctgccaccagcgccttgatctgctcgcgggcttcggcctcattgctccaatttgccatcgtctgctcccttactcactcaaaaattccttgatctctttgtccatctccgccgggatatccccgccggaaagccataccttgctgaacgcaacggtcttttgcatacattccgccatatgccagcgcggtttccagccgaaggtggatttcaatttgctgcaatccagcttcaaaaagtttgcttcatgcggagcgtttgcctcagcgcggttttcccatgcggcaccatcgccccacgcctggcagaacaggtctaccagggtgccggtcgtcacacagtcgcagtcatccgggccgacgttataatagccggcgtaccggttatcctcatactggcgctgggcgatcagcaggtacgccgccagcggttccagcacatgctggtatgggcgggtggaatacgggttgcgcacaccgatgctctccccttttgccatcgcacgcacacagtccgggatgatgcggtcattggcaaaatcgccgccgccaatcacattacctgcgcgggcagtggagacggccacgctgccatccgcaaaaaagctgtttttatagctgtgggtcaccagctccgagcagcttttgctgttggagtaggggtcgaagccgtccaacggttcgttttcgcggtagccccagcaccattcattattctggtacaccttatccgttgttacgttcagcacagagcgcggtggggtttgggcggtacgcacacattccaacaggttcacggtgcccatcacattggtttcataggtatagcgcgggtccttgtagctgtcccgcacaatgggctgggccgccaggtgcagcacaatttccggccgagcggcatcaaaggccgctttcagggcggcaaaattgcggatatcaccgatcacgctggtcattttgccttccagccctgccagagagaagaggttgggggttgtgggcggttccaggctgtaacccgttaccactgcaccggaacccaccagcatgcggcagagccagctgcccttaaaaccggtatgcccggttacaaacacgcgtttgccgcggtaaaattccaagttcattgttggttccacacttcccagggcgcacagccagacgcccacattttttccagcatacttttttcgcgctcggtatccatgcactgccagaatccgcggtgcacatagctcatcagctggcctttggctgccagctcgcgcagcggggcctgctcaaaaatggtatcatcgccactgatggtatcaaacacttccggttccagcaccatatagcccgcattgatgatagccccatcgttgacgcttttttcacggaacgcctgaaccgaattgtcctggccgatatccagcacgcctttctgctgttcctgcaccacggcggtcagggttgccagcttgccgtgctgcttatggaacttgaccagttcggcaatgttcacatcgcagacgccatcaccataggtcatcataaaggtttcgttgccgatatatttctgcacccgcttgatgcggccgcccgtcatcgtgttcaggccggtatccaccaccgtcacgcgccacggctcggcgtgctggtcatgcacgatcatctcgttgccctgggtgaagtcaaaggtcacatcgctggtatgcaggaaataatccgcaaaccactccttgatcatatgctgcttgtacccggcgcagatcacaaaatcattgaagccatagtaagaatactctttcatgatatgccacaaaatgggcataccgccgatttcgatcatcggtttcggcttgaacttgctttcttccgaaatgcgcgtgccatagccgctggcaagaattacaactttcatatttttcactcccgtaagcctgcagcggaaccctgcttgcagtcccgcaaaaactgtccgtcccaccagcatttcaaccgccggacagtttggtacacacccagcctattttttattactatgatagtatatcattttcacgtattcagtgcaaccgttccaggaaacttatcacacctagtaggcttgctttttattccgcattttgctctttgttatcacattttaacgccgcttttgttgccgctgtgcaaacaatattctttacgttttttcgtgcgtattttgtccctgccaggcggcccactttacattagtaggcaaaacaggtataatagtttagttaatctgtgatattgcgccattttgccatattgcggatgcaggcggtcttattttatccttgctgcctgtggattttttgcggcatgccgcgcgttgcgcggtaccgctcctattaggtctggaggttgcgctcatggggctgcaaagcctgcaatactgtgcatttttggtggttgtggctgccgtttacctgcatctgccggtgcgcatgcagccggtgtttctgctgggagcttcgtgggtgttttatgcgctggccatgccggccatgctgccggtcaccattgcactggcggtgttcacctacctgtgcggccgcggccttgcctggcggggcggcgcacacaaaaccgcctttttgcgccttggcgtgatcggtatgctgggcattctggccttttttaagtataacggcctgttgggcggggtgctgcacggctggcgcgtggtggccatgccgctgggcatcagctttaccagttttgccgcaatcgcctacctgatcgacgccgcccgcggcgactgcgaggtggaaaccagctttatccggctggcgctgttcctcaacttttttgccaccgtcacccaggggcccatctgccgcgccggtgcgctgctgccgcagttgagcgccgagcaccgctttgatgccgcccgcacggtgcgcgctttgcggctatatgcgctggggctgttcaaatacattgccgtggcggatgtgctgaacatggtggtggatacggttttcccccactatgcggattacagcgcccccatgctgattttgaccgcggtgatgtacactttttatctgtatttcagcttttccggctattccgagatttcccgtgccaccggccttgtgctggggctggacctgccggaaaactttaagaccccgttttacgccaccaacttttccggcttctggagccgctggcacatctcgttttcttcctggctgcaggattatctctttatgccgctggcctgggcagatcttggccgctttggccgcctgcccaccgagctgtgcgtgttctgcgtgttctttgcttccggcttctggcacggcagcaccgcgccattcatcatctggggtctgctgcaggcggtttaccgcgtgggcgaagagctgctgcaccgccgctttggcaaacccaaaaagcgcggcaccccggcccgtgtgctgtggggcaagcgggttgtggtgtttgttttgtggaccatcagcatggtgttcttccgcgtggggtccggcaacctttccggcatggccgaaaacctgggcgttggcgatgctttcgcctacctgggccgctgcctgatgaacagctggtcccccgcccgctttgccggggagctgtacagcacagcgtataccggcttttacgccaataccattatggtagcggcttattgggcgttcgctgcgctggcgctggcgcttggcatctggctggatcaccggcgcaattttgcctgcaaaaacaaaccggctgaggttgccctggcaagcgccaagcaccgcaatgcgctgtatgttgttttgatcgtttttatcctggtggggtacatcatgcagagcggcggctttaatgccaacgcgttcggcccctatgcagggttttaatcttatggaaaaaaggagatttccggcgtgaagcatatcatcaaaaaattggcgctgctgttcgtgccggtctatctgtggtttgccttttttgtggcgtttgagccaaacaattattttggcatcaaaaaaacagcctcttccagccagccggtggcccgtgtgcgcgcctatgagcagagccccggcaccaacctgatcatcggggacagccgcctggcccactttgatatggaccttgtggattccctgaccgggcaaagctggcagaacctggcctttggcggtgcttccctgaaggaatgtgtggaccttgccaactatgtgctggattccggcaaccaggtggaccgcattctgttcgagctttcgttctacaccttaaacagcagctataacaccgaccgtttttcggcgctggaagctaccctgcgcaacccgctggcctactgtctgaacctggaatacaacgtgaacgccctgaccgtgtttatggacaccgtaaagggcacgccggacaccattgaatccggcgactggaccgcggcggattacctggatgatgccgggaacacgattccgctgcacaaaaagctatatgagtacccggcgctgatcaccacccgctgccagaactggacactgaacgaaaccgagctggcggagtttttggctatggcccagcgctgcgcagaccgcggcgtggagctgaccattgtgctgccccccatggccgccaatgtgcgcaccgaggtatgcgatgcctttggcattaccgccgtgatgcaggacgaagttctgccgctgttggaaaagcagaattttgccgtgctgaattacgaatggtgcaccagctgcattaccgatgatgacacccagttttttgacgggttccacctggacgaaaaatacggcctgccggactggacagccgaactgtttgatgatatgcagcgctgatgctgccccaccccaaaaaggaggtcccctgtggcactggactttttgattttgtacgaacacaccgttcgggaatatgagagtgatcttttgctcaaattggagctggagcgccgcggctacaccgtgcgcatccgccagctgctggatgccaaagatctgcgcctgtttggcaaagacaagccggaagttctggttgccagctgcatgtatgacaacgaagccatcaacagccatgtgtacaacaacattggcagatgcaacaagatcgtcaacctgcactgggagcagatgctctccgacacgcaggaggagggcgattggttcaacatgaacggcaacgccaagcgctgcgtgcagacttgctggggccagcgcactgcccagcggttacaggcccatggcatggatgccaagaacacccccgtgaccggcgctgtgatgatggactttctgcggccggagttcaagggctactttaaggataaggaaaccctgtgcaaggaattcggccttgaccccgccaaacagctgcacctgtacatttccagctttggctatgccagcatgaccgaccaggaagtagccgagctttccaaaatggcgggaacggatttttccggctttgcccgcaccaaccgcgtttcgatggaaaaaacgctggcctggtttgaccgctacctgggtgaccacccggaggtggaactggtataccgccgccaccccagcgaatggaaatgcaaagccctggacgagctggccgccaaacgccccaacttccatgtgatttttgcggattccgtcaagcagtggattgtggcggcggattccatctccatctggatgagcaccgctgtggccgaagtatacatggcgggcaaaagctgccatatcctgcgcccggtgcccatcgagcacgagtatgaccccgtcatctacaaggatgctcactatgtgactagctacccggagtttgccgctgccatggcgcagccgaacccgccgttccccattgcacgggatgtgattgagggctattttgacccctcccttgccccggcctacaagcggatggccgacctgctggaggaagtgtacaaaaatcccccgcgggatgaaccgatggggcccggctttacgccgcacttcaacctgctcaagttctgcgcactggcgggggtacacatgctgtaccgccacaagtgggaacccaaacgggtgtttgccttctgcccgccgctggccaactttgcccaacgcatttacggttatgtggacaaagcctatatcccgccggaggagatccagcgcatggaagcgcgcatccggccatatgtaaaataaagttgtttttccggcgcgctgcggtgcgcccgctgcaaatgggagcctgccatgtctgaaccgaaaaaaactgaaagctttgccggaaatgtgatgaaatactccattgccacctaccttggctttggcatttccggcgcagcgcttatcatcaagggcgtcctgcccgccgaaagctacgccgttcctgcttccttcatggcatacaccatgtcgctgatgaacgtgggcatgcttgggctggaccaaagcctgctgcgcttttaccacgaaccgcctgccggttccaccgggcgcagcatgtttgccgcgtgtacccggctttcggtgctggtcatactgctggtgggcggcatcggcagcatctttttcgccaagccgctggcggcggcctttggccttggggccaacggtgccgggctggtgccgtttttgttcctgaacgctgctctgtacatgctggtgcgttacctcaacgtgctgctccggctggaaaacaatgtgcgcgcctacaccaccgaaacactgtggatgcaggcctgcctgaacctgatctacctgctgcccggctttgttacccaggacgcccgcgcttttgtgctgggtgcggtgtgcagctttgcgggggtcgcagtgttctattggcggcgggcttctaaaggtcaaacgaaagaggcccctgtgcgcggcctgcgcccctatgcccacatttaccgggcggcactgccttacggcattgtgttggcacctgcggccatcctgatcccgctgtaccgcgccatctgcctttcttttttaggcaattacgcccccgcggcggagcagggttcgtttgatttcgcctacaccctggcccagcttgtcaccaccattcaggctggtttttccacctactggggcccctatgtctatgcgcattaccgcaccgagcaggagcgcattggccgcatccatgatctgctgaacctgctgatcttcggctttttctgcctgctggtcatgtttgaggatatcatcttcatcatcttcccggccaaatcggcctgcctgccctactttccgctgatgatgctggccgtggtgttctccatcctgtgcgaaggcacggtgtacggcaacaccattgcccgcaagccgttccatgatacgattggaaccgccgtgggcgttgcggccaacattgccgtgtgcgccgtgctggtgccgcgttttggcgtaatgggtgccgcggtcggcctggtagcggccaatgcaacgatgtttttgtaccgcactgtgaccgggcagtattactaccgcaccatccccagcttcagccggacgatctgcggctttttgctggcggtgggtgtggccgtgatcggcgtggtgttcgcccacaattttatcatcaagtttgttttgactgcggcaatcctgtttatttactgtaacatttaccgtgcccagctgtacaagctgtggcagatctctatgggctttgtgcggcggtatctgctgcacagccaagcataactactgcaaaggaaaggttgtatatcaagatgaagcattgcggcacacaagagttgaccaccgagcggctggtcctgcgtcgtatgacaaccgacgactgcgaaatgatgtttggcaactgggccaatgacccggaagtgacccgctacctgcgctgggagccccaccgtgactgggtggtaacgatggcatatctgaacgagatcgtcaaacaatatgaccgcccggatttttatgattggggcatctgcgataaagtgaccggtgtgctgatgggcagcatcagcattgcccccgccgaatcctgtgagcgtgaaaagccctatgcctggaaaaacgtgaaaaccgagctgctgggcggcatgtatgagatcggttacaccttgggcaaaaagtggtggaaccagggttatgccaccgaagccaccgctgccgtgcgcgattactggtttggcatggtaggtgcgccctggctggccgggttccacgccagccagaatgtggcaagcagccgcgtgttggccaagaccggcttccattatgaccacgataccgttctgcaccgctttgacggcaccgaggtgccctgcctggcctggtacctgctgaaccccggcagccagaaatccgatgaaccggcagccgctgcccccgctgtacaggcagaaccaacggaaccagcggagaatgccgatacaaccgtctgacattcactcccctgccccatacttttgctgacctggccgaatacggccagaaaggacccctatggacgaaatgaaggaccccatcaccctggactttaccgctacccaggccccggcagaggacgcccctgttgggcagaaggctctggacagcgagcgcccgccggtgcgcgttgtgctgctggcgctggaccagggcaagtttgacgcccagcgcagcctggatgagcttgccgccctggcggaagccaacggcatgcaggccgttgctaccgtgtgccagaagcgcagcacccccgaagccgccacccttctgggggaaggcaaagtggaggaagcgcgcctggtatgcctgaataccgatgccgaggccgccatctttgacggcgagctgaccggcagccagatccgcaacctgagcgcggctttgcaggtggaagtgctggaccgcacgatgctgattttggaaatcttccgtgcgcgcgccaccaccaacgagggcaagctgcaaactgagctggccaccctgaaataccgcatgccgcgcctgcagggccttggcgaggcgctgagccgccagggcggcggtggcggcggcggtggcggtgcccgccgcggtgccggtgaaaccaagctggagctggaccgccgctacctgcgcagccgcattgaaaagctggaaggccgcctgaaagagctggaaaagcgccgtggtgaaacccgccgcgcccgccagaaaaacggtgttccggtcatctcattggtgggctacaccaacgtgggcaaaagcagcctgaccaacgctttgtgcggcgcagaaatttttgaagccgacatgctgtttgccacgctggatcccaccgcccgcaaatgcacgctgcccagcgggttacaagtgatcctggtggatacagtcggctttgtcagccgcctgccgcatgatttggtggatgcttttaagagcacactggaagaagctgcctgctctgacatcatcttgaaaattgccgacgccagcgacagcgaagccgccgagcagctgagcgtgaccgatgaagtgttgaacgacctgggctgcggggatatcccgcaggtgacggtctacaacaagtgcgaccgcaccggtgttgccccctatgacccggatgtgctgctggtaagcgccaaaaccggctacgggctggacagcctgctggccaagattgacgagattctggcacaccgtgtgcgcaccattgaggtactgttgccctatgacaagctggccctggccgatgtgttccgcacccgcggcagcgttctggctgaagaataccgcgaaaacggcgtgtattacaaggcaaccgtaaaggtggatgacctgcaccggtttgaagcgtacctgctgtaagcgcaaccgttcgctttgtgcaagataacaaatactgattttattgctgattgtagacaaaaagacctccatccctgcacggttctgtgcttgggatggaggtctttggtttatttgtgtgtaccctgcgttacggcaaaattattccgccgtcagcagtttaacagcgcgggaggtacccaggcggtctgcgcccagatccaggaacttttccatgtcctcaacggtggaaatgccgccggctgccttgatcttgcagcggccgcgcacgcagcgggcaaacagctcaatatcatggaaggttgcacctgcggtagaaaagcccgtgctggtcttgatgaagtcggcaccggcttccaccacgatatcgcacatcttttctttttcttcatcggtcagcaggcaggtttcaataataaccttgagcaccttatgccccacggcccgcttgacggcggcgatatcctcgcgcacagcgtcatattccttgttcttcaggcggccgatattgatgaccatatccacttcctcggcgccgttttccacagcggtctttgcttcaaagcacttggaagcagtatccattgcacccagagggaagccgaccacgcagcacaccgcaacacggcccgccatatactgcacagcctgcttgacatagcaggtgttgatgcagacggatgcagtatgatacttgatggcatcatcgcacagggcctgaatctggggccaggtagcctccggtttcaacagggtgtggtcaactttggaaaggatttcctccttggtgtatttcat

SEQ ID NO: 93 - DNA, 16778 bp, unidentified
  source 1..16778: mol_type = unassigned DNA
atgcaatataaaagttataaaggagatagtggcatgagagaagaattattagcgatcatagagaagaacagcaggatcgatctgaaggaactggctgtgatcctgggagtggaagagatcgatgtggtaaatgaactggcagcactggaagcagaagggatcatctgcggttatcataccctgatcaactgggagaagacagacattgaaaaagtaagtgctctgatcgaggtacgtgtaactccccagagaggccagggctttgacagtattgcagagcgtatctacaaatatcctgaagtgcgcagtgtgtatctgatgtccggagcgtatgatctgatggtcattctggagggtaagaccctgcgggaggtatctaattttgtatctgacaagctgtccacactggattctgtgctgagtacagcaacgcattttatcctgaagaaatacaaggatcacggaaccgcatttgctacgaaaaaagaagatgaaagagagatgatcactccatgagaaatccattagcagataaagtagtggatatcaaaccatcgggtatccgcaaattttttgacattgtaagcgagatgcaggatgccatctctttgggtgtgggagaaccggattttgatactccctggcacattcgggacgagggtatctattccctggaaaagggaagaaccttttatacctccaatgccggtctgaaggatctgcgtcaggagatctgcaacacaatccggagaaaacagggcgtaacctatgactggcagcatgaagtgctggtgacagtcggtggctctgaggcaatcgatatcgggctgcgtgccatgtgcaatccgggagatgaagtcctgatcccccagcccagctacgtatcctatgaaccctgtgcgatcttggcaggagcgactccggtgatcattgacctgaaggcagagaatgaattccgcctgacagcagaggagctggaggcagccattacggacaagacgaaggtactgatccttccgtttcccaacaatcctacgggagccattatggaaaagtctgatctcgaggctattgcaaagatcattgagaagcatgacatttttgtcatgtccgacgagatctattcagagcttacctataaagagaagcatgtttccatcatcagtcttcccggcatgaaggagagaaccgtttatatcaacggcttctccaaggcatatgccatgactggatggagattgggatactgctgcggacctgcagccattattcagcagatgacgaagatccatcagtttgccatcatgtgtgctcccaccaccagccagtatgcggcagtggaagctttgaaaaacggagatcccgacatcgaggagatgcgtacagcctataatcagagaagacgctttttgatgaatgcgttccgtgagatggggctggagtgctttgaaccttacggtgcattctatgtattcccctgcatcaaggaattcggcatgaccagtgaagagttcgccaccagattcctggaggaggaaaaagtagctgccgtgcccggaaccgcatttggtgacagtggcgaggggtatcttagaatctcctatgcgtactccctggaaaagctgaagaccgccatcggaagactgggacattttgtagagaaattaagagcagaacaaaataataaataaagcatttttcagtaactattcggaaccacaggctgtaagtggcgctgaatagttactatgctgtagaggataaattatgcatattatattacatcagccggagatcccggcaaacaccggaaatattggaagaacctgtgtggctaccggtaccagcctgcatctgatcgagccgttaggctttcggttaaatgaaaaagagatcaagagagccggtatggactactggcagcatctggatgtcaccagatatatgaattttcaggagttccgggaaatgcatcccggagcgaagatctggatggcaaccacgaaagcacaccagacctacaccgatgtgaagttcgggccggatgactacatcatgttcggcaaggaaagtgccggaatccccgaagagatcctcgtagagcatgaagagacctgcatccgcattcccatgctccccgagatccgttccctgaacctgtccaactccgtagccattgtgctctacgaggcactgcgacagcagggattcgagagcatgcagagggatggggaacttcatagattacattggaaagagaaagaacaataggcctctttacaaaacgtccatggaaaggtaatatacttttataatgcgatttataaaagataatgaatgaggatgaatacatggacaaaaggaattctacaagaggcaggatcatcaactatatgttgaaccatccaatcacctccaaggcagaactttcaaaggaactgaatatcagtatgcctacggttctgacgaatgtgaatgaactgatttcccagaagctgttgacagaactgggggagtatgagtccaccggtggcaggaaggcgaagagcatcggtatcaacaagtcctatcgcagagcaatgggggtagtcatcagtgccaatcatctggaaatggtactgatcaatctgggttccgagattgaaaaaagcgtccgggtgcgtctgaagttctccacggatttttcctactgtatgcaggtgaaaaaggagataacgaaattcctgaagggaagctgtgcggaagaggaactgctgggggtcggcattgcgattcccggtatcattgatcagcagaaccggattgtattgaaatcgcatgctttgcagatagagaactacagtctgcgttttctggagcaggcactggaactgccggtatattttgagaatgacgccaatgcggcaatgttggcggaaaatccccagaaatatcaggatgccatctatctgtccctgaatcatacgctgggcggagccttttgcatcaacgggcagctgttccggggaaagaatcagaaggccggagagttcggacatatgatcctcattccgggaggacgtaaatgctattgtggaaaagtcggctgtacggatgcctactgtgcggaaagtgtgctgacagacgacaacaggatctcactggaaacctttatgacacaggtgaagaacaaagatgcggcagcaggcgtcaaatgggagaactatcttgaccaccttgccatcctgatctccaatcttcggatggcatatgatatggatatcatcctgggaggagatgtcggcggtgtcctcgcagagtatatgattccactcggagagaaagtcatgggatataatggatttgaccatgatgtctcctatctgaaaaactgtgcctatgaaaaggaagcatccgcagtaggcgcagcaagacacttttttgcagatatatgccattgatggaatactcaagtaatcaaataaaaccaggaaaacctgattcgtaatgctataccggcagatgcggatcagtttttttttaataaaattttatgacaggtagttgacaaatcttccctttgggatgataatacaaatactttaataaagtattttataaaagcgaatacaaaacaataagagagcaaaaacttataacaaaaaggagaggattattatgttacaggaagtaatgacaaaacccggcgagatcatattcagagagattcccgttccggagatcacagaggatcaggtgctggtgaaaatcatgcgtatcggcatctgcggttcggatattcacgtatatcatggcaagcatccctttacaaaataccccgtaacacagggacatgaggtatccggtgagatcgtgaagattggagacaaggtaacacagttccatgtgggacagaagatcactattgaacctcaggtatattgcggacactgctatccctgccgtcacggcaaatacaacctttgtgaagaactgaaggttatgggcttccagaccacaggtaccgcttcagaatattttgcggtagatgcatccaaggtgaccccaatccccgaggaaatgtcttatgaggaaggagccatgatcgagccgttggcagttgcggttcatggggtaaaacagatgggtgatgtgaccggtatgaacatcgtagttatcggtgcaggccccatcggtaatctcgttgcacagactgctaaaggaatgggagcagccaaagttatgatcacggatgtcagcgatctgcgtctggaaaaggcaaaagagtgcagcatcgacgtgtgtgtaaatacaaagaataaggatttcggagaagccatggtagaagctttcggcccggataaagcagatgtgatttacgactgcgcaggaaataatatcaccatgggacaggcgatcaaatacgcgagaaaaggaagcgtgatcgtactggtagctgtattcgctggcatggcggagatcgatctggcggtagccaacgatcatgaactggatatcaagagtaccatgatgtaccgtcatgacgattatgtggatgcgatccgtctcgtcaatgagaagaaggtacacttacagcccctgatttccaaagtattcccgttccgggattacctgaaagcttatcagtatattgatgataaccgcgagactaccatgaaagtcattattaatgtacaggaataagagggagacactatggacaacaaatacggagttacgggaattgcacatatcggaattccaaccaatgatatggaaaaaaccatagaattttacaggaatctgggatttcaggtattgctggagacttataacgaaaaggcctgtgaaaaagtagcttttctgcagcttcaaaattactgtattgaaaccttcgaaaaccatcaggcagtaatggcagacggcgcatatcagcatgtggcgctggatgttgcggatattaatgcggcctatgacaggatctgcgcggagggtcacaagattatcaccaatggtatagaagcattgcctttttgggaaaacggtgtgaaatttttcatgatcaaggggcccaatgaggaaaagatcgaattttgccagaaactttaaatacaggaagcaggtggattcagaatgaaaaaagagatagcgatcgcagcgttaggagaactcttgattgattttacagaagcaggtatcagtaaaaacggcaggaaactgttcgaacagaatcccggcggagcaccggcgaatctgttgacggtggcaagccatatgggataccggaccgctttcatcggaaagataggaaccgatatgcatggagcgtttctgaaaaagacgctgcagcaggaggggattgctaccggagccgtggtggaggatgagcattattttaccacactggccttcgtggaaattgatgaaaagggagaaagaaacttctcttttgcgagaaagccgggagctgatactcagctacagacggaggaactggatgtgaagctgctctctgactgtcggatttttcattttggatccctgtctctgacgcaggaaccgtcaaggggtacaacgctggaggctatccggatcgcaaaggacgcaggagcgctgatctcctatgatcccaattaccgggcatctctctggcccgatgaggagaccgccgtggcacagatgaaatcagtgattccgctggcggatgtaatgaaagtatccgatgaggagagtctgttactcaccggagctgctgactatgaggaagcggctgatcaactgctttctaatggtctgaaactggtggcaattaccttgggaagcaagggggcgctggtagcaacatcgacctacagagagatcgtgaaggcctttcctgtaaatgccgtggataccacaggtgccggggattccttctggggcggatttttaagctgttatctctcttatgacaaaaaaatggaagaccttggggtggaagaactcagaagatgcgccctgaccgggaatgcgacagcaggactgtgtgtacagaagcggggcggaattccttccatccccaccagaaaagaaatcgaagaatttatacgggagaggacggacagatgaaaatagttgccgtagtatttgacatggatggagtcttatttgataccgagcggatcggtgtgcagagctggacagaggcagcagagcctaccggtttgcaaaatgcttacgagattgcgagaatgtgcattggaagaaccattccgggaaccaaagaagtcttcatggcagaagcagaaaagcagggaatagtgttggatttcgagaaactgcatgccgactgcagcagacggatcttcgaaaaggaggagagggacgggctgccggagaagccgggggtacatgaaatcctcgaatatcttcatgagaaaaagattcctgttgcattggcatcttccagcaaaaaagcgacggtgctcagtcatctggagaagtccgggatcaccggctattttcagaagatcgttaccggagatatggtcacgcatggtaagccatcaccggatatctatctgaaagcctgtgaagaactgggtgcagcaccggaggaagtgatagctatagaggactcctttaacggaatccgatcggcttccgcggcaggattacatccgatcatggtaccggatcagctgcagcctaccgaggagatcctgttgctggcagaggcaaagtgtgacagtttattggatgtaaaacagttattggaagataaatacttgaaataaagaggagtgtagcagagggaaaacagaagatacataagggagctataatatatgaaattagcaacatcaacgaatatcatggatgcggactgcgacagaccgtaccggatccccgtcgatgtatctgccagagcatgtgcccgcgcgggctatcaatatgttgatgcctgcctgtgcagctattgcagagagggacaacccctgcggggagaatactgggaaaagtggatcgaagaaaccgtagcgctgaaagaagaactgaacatacagttcccgcaggcgcacgcgtactggacgatcggggaaggctttctcccggacagaacccgcagtgacggcgaactgggggaagaacttatgcggcgcagtgttcttgcagcggaagcactgggcgtgaaatggatggtcgtacatccctattccatgagccgtcacggcggatacgactatcgcggatcctataaatataatgtcgaatactggaaacgctggggagaattctacgcagagcacaatgtcggaatggcgatcgagaatatgaatcgaccgacccattacggcagctgcgcagaggaactgttagaattgatcgatgctgtgggcaatcctatggtgcagatctgcattgacacaggacatgccaatatggtgggactggatgtgccggcaatgatccgacaggtgggttttcatctgaaggcgacacatatcaatgacaatcatggtacgacagacgaacattttgcgccctataatggtacgattccctggaaagagaccgtacaggcattacgtgatattcattatcaggagtgttttgcattcgagatccaccatctgaccagtatgtatccaaaggaggtgcagtctgcactggtagatttttcctatgtactgggaacatatctgttgggggaacaacaggaataacacgtcgcaaaaatccgtgaaaagcagacaaacgaccggcacagcccatgtatgtgaatcgtggtagtgctggttttctgtacaaaaatataggaggaggcaagtaatgctgaatacttttacggaatattttgccggatttacgacaggagccattgcactgcggctgctattcgcggcagtgctgggctgtatcatcggactggaacgggcaacaaagcatcatcctgccggaatgcggacttttgcgctggtctgtctcggggcggcggcctctgccatcgtaaatatttatctggggacggctttcggaacagggcggacagacttaagccgtattccggcaggcgtagtcagcggaatcggttttctcggagtggggacgatcatcatcaccggaaagaatcaggtccgtggccttacaacggcagccggattgtggacgacagcgacactgggaattatgctgggctcgggaatgctgcagatcagtctgatcctgttcgtgctcattttcagtaccatgtttggaattgcgaggatcagtcgcgtgcaggaaaaatataaccgctatatcggactgtatatggaaattgacaagacaatgacccgcggtgtctatgattatatcaacgactgtgggtacgaattgtcttctatcgagaaaaagagagataagaccctgaaaggttccgatattgtgctgatcctgatgatggatctgaaaaaacgtagaaatcatgcggagatcctgtcggaagtgagccagcttgagggagtgcattatctggaggaagtatgactgaaatcataagattagcagattttacataaaatttacaatatgtacgtacataaaataaacagcatgggaaaaatgaactaaatatcaaataaaaataatgttatgttactcataataacaaatatgttttaaaaaatacaaaatatgtattgacataataaccaagtaggaatattatatagccataatgttactacataaaagggtgggtgaaatgtcagagaaaaagaaagtaaaaaatgctgaatatgatgtcgtagttatcggtggcggaatgtccgggatctgcgcagcactggcagccgcaagacacggggccagaacagcattggtgcatgaccgacatgttctgggaggcaatgcttccagcgagatccggatgcacatctgcggagcttctgagaatctcgcgaagccggatcttgaggagagcggaatcctgcatgagattatgctggacaacaagagcagaaatgattattataatttttcgatttgggatatggtccttttttcaacagtgaaaagacagaagaatcttacggtgtacttaagtacggcaatggaaagctgtgagatgggagaaggatccacgatccgcagcattgatgcctaccagctgactacggagacgcactggaagatatccggtaaagtcttcatcgattgcaccggcaatgcaacccttggatattatgcagaggcggaattccggacaggcagtgaaggcagggatgaattcggggaaccggatgctcctggacagccgaacaaggaacggatgggcaacaccttattattcaaagcggtggacagaggacatccggtggcattcaaaaagccggattttgccagaacctttacggaagaagaactgaaataccgaacccactccgcagtacatggagcacagatcaagggagaggtggacaaggcatatgtaagaatgacatccttcagtacttcttcggtagactacggatactggtggatcgaacttccgggtgagacagatgacatcattgacgagtatgagcagatccgggatgaactggtatcctgcatttacggaatatgggatcatttgaaaaacggtggcgaccatggcgcagaaaattacgatctggaatgggtcggaatgctgccgggttccagagaaggcagacgtctgataggggattatatcctgaatgaaaacgatatcctcagcaacagacagtttgaggatgccgtggcctacggaggctggccgatggatatccacacggcgaaggggctttacgattttgatgagcttccctccagagtgatcagcttcgacggtgcatatacgataccttatcgctcctattattcaaaaaatatttcgaacctgatgatggccggacgagatatcagtgccagcaagatggcaatgggatccacgagagtcatgggaacctgcgcagtcggcgggcaggcagtcggaacggcggcagcactctgtatcaaatatgactgtgatcccagaggggcgcaggaacatatgagggaattacagcagatgctgttgaaggatgacgcttatattcccggcatctggaacgaggatccgaaggatctggcgagaagagctaaagtcacagcaacctctgcacgggaaggctgtcccccggaaaatgtaatcaacggcatttccagagatgaggatggacaccggaacctgtggatctccggcaagggtagaaccgaaggagagatgcttacattgcatctggccgacagacagccggtatcggaagtgcatctgactttcgattccaatttccattatccgatcaagatcacgctgtcccgcaagaggcaggcacagcagaggatcggggtaccgccggaactgatcagagactataccgtaactctctggcagggagataaaaaggcagcgaagcagacggttacagagaacgttcaacggaaaaatatagtaacttttcctacaacagaatgtgacagggtcacggtaatggttcataagacgaacggcagtaatgaggcacatatttacgaaataagggtgtattcctgagatgtctttggatgaggggacgatcaggttgaccatagacaacaatacaaaggaggattacgatttatgaagaagaaaattgcattagtactgactatggcaatgttgggatcctgtctggcaggatgcggtcagaatgcagcagacgacagtgcatctgcagaacagaaagaaagcacagcggttgcacagtccacggaagcggcgcaaggtacagaagcaggggagaaggaatggttcggtaccgatgacggcaagaccgttacgattcgtctgtggggcggcgtacagccggaatatggatacgatgaagtgtgcgcaaactttaatgagcagtacaaagacaagggcgtacaggtagaatatgtacgttatgtcaacgacagttcaggtaatttacagctggagacttatctgatgggcggcggagatgtagatctgttcttcggatacggcggacgttccaagctggacaagcgtgtcgagtccaacctgttgttagatatgtccggtatgctgaaagattacggatttgatctggagacagaactgggtgaatccaatatgctggattacaaatatgatgatggatctgtttacggtttcccgacaaaatacgagaatgcaagatggctgatgatcaatgaggatatgttcaaggaagccggtattgatatcccttatgatggttggacctattccgaattcttaagtgcagtggagaagctgacccacggcgaaggtcaggataaggtatacggattgtgctggagccgtaagcagaactccagatatgtgcagctgatgctgaactccgtactgggttcctaccaatcctacaagaatgatgaaggtacggaagtgaacttcgataacaaggtatatcacgacggttttgagatggtaatgaagactctggacaatggctgggcaatccccattgaagatgagtactccgaggacctgagtgttgccaacaccttcctggagggcaaatgtgccattacactgggcatccccatgatgcgtctgtgtatggatcaggaaaattatcctcacgatttcgttactgcactggtacccgcacccgttcccgatgacgagcagtataataccgagttctacagaacccatgcaggtaccccaggtgccggcgacctgatgtgtattgcggccaacaccaagtatccggaagcctgcttcgagttcgctatgtggtaccttaagggtggtatggctcctttggttaagggaggaagagttcctctgtggaatggtatcgataaagaagctgttcttgatgtactgaaggcaaatgcagaaggctccattgatctggaatccatgaataactatctgtctgtggacagaacgcagggtgttaagacggtacagggtgttgcatctaccgaagtaagtgccgtatggaacgaagaatttgacgcaatgtgctatggcagacagtctgtagatcagacgatcgacaatatggtcaagagaagcaatgaactgatcaagacggaactcgaaagcaagaaataagtaacataacttacaacaaatcagcggaaaggggcggaagcgtttcaggtgatccgcccctgatctgaaacagataaacgagggaaaatgaatggaaaccaagaaaaagaaaagcaaaggggaaagacaaaaaatactgcatcagaatctggttgcatattcctttctggcgccgagcctgatcggtgtaatatgttttagcctgatcccgctggtgatctccctgtacgtaagtctgacggactggaatttcacacagggaatcggaaactggaatttcgtagggctcacaaatttcaagaatctgtggacagatgagtggtttaccgcttctctgaaaaatactctgctcttcaccattgtcaccgttccaatcggattgttccttgcaatcgtgattgcggtactgatcgacgagttctgccataaaaaggttgcaggtgtagtacgagtggcaatgtatatgccgcatatctgtaacatcgtggcaatctccgtagtgtggatggcactgtattccaaatacggcccgttcacccagctgatgaaagcgctgggctggcaggatcctcccagattccttgcaagttacgaatgggcactgccttcgatcatgctcgtagtcatctgggcaagtctcggataccgcgtcttcatgtacagtgcggccatcacaggactgccgagagatttgtacgaagcagcagaaatcgatggagcgaatccggttcagaagtttttcaagatcaccgtgcctttactgaaaccgactacatttttcctgacgatcacgggtatcatctccagctttaaagtattcggatataccaatgtcatgacaaagggtggccccggaagctctacctataccctggtttattatatatacacctcggcattccagtactacaagatgggttacagttccgccattgcagtgatcctgtttatcatgttgctgatcgtaaccattattcagtggatacataacaataaagaagagaaaggctagggattaagatgaagaatgtatctgtttccaaaaaagtgaccagactgctggttacgataatcatcgtggcagtcactctggttatggtaatcccatttgtctggatgctttccgcttcctttaagacagaagcggatgttatgaagatccccattgaatggataccgaaatatttctatattgataactacaaaaaggttttaagtatcggaaccacaagctctaccaattatcatttcccgctggcgtatttcaactctatcaaggtcgcagttatcagtacagtggtggcaattacctctgcgactctggcaggctatgcctttgccaagttgaagttcaaaggttccaatgtactgtttatcatctatctggcacagatgatggtaccctcccagctgacattgatccccagattcgtgatcttttcccagctgggctggatgaacacccacatgtctctgatcgttccgaagatcattgcagtatcctctacatttatgctgcgacagtccttcctcggaacaccggatgaactgcgtgaggcagcacgaatcgatggtgcgggagagtaccgtgcatttgcacaggttatgctgccactggtcaagccggccatagcagccaccgcaaccgtacagttcctggatgcatggaacagctatctggatccgctggtattcatctccaactggaaaaaatggacgattcctctggcgttgaaccagttcgtaggttccgaggtaacacagtacaatctgaccatggcagcgtgctgtctggctgtagtaccggtatttattgtattcctctgcggacagagatttttcctgaaaggattatctgtaggtgccgtcaaaggttgatcaaccaaacaagaaatgtatgcaggcaggaggggagagttctcatctcctgcctgttttgcaatcggagcagcgaagctcggaagaggagagtattatgtcagtacataaggaagaacgacattatgaagtagtggtagtcggcggaggaatggcgggcgtttgtgccgctatcgcatctgcgagaaaaggtgtcagaacggcgattgtgcagaaccgttccatgtttggcggaaatgccagctcggaaatccgtatgcacattgtcggggccaatgcccacggatccaagaagaatctgggggaaaccggcattttactggaaatcttactggaaaataagcggcggaatccctatgcgtcctttcctgtattcgattccgtgatctgggaaaaagtgcattttcaggagaatcttgatgcttatctgaataccgatatggacgatgtcattatggacggcaaaaaagtagcggccattgtcggccatcagaacaccacagagacagaatttacaatctatggtgatatcttcgtggatgccacgggacatggcacgctggcgaccatgggaggcgctgccggaaggatgggcagcgaaggacgcgatgaattccatgagccggatgcgccgacggaaccgaatcaggatacgatgggcaatacattgatgttctctgccgtagacagaggagagccggtgaagtttatccgtcctgactgggcatatcagtattccgaggaagatctgaaatacagagagcatggcaacagtatcggctcccatatggagggtggacagctgaccaagttcgaggagggcagcggaaggctgccgcatttctccaacgtggattccggttattggtggatcgaactgggtggccagtatgacgatattatccgggatggtgaagttattcgcgacgaactgttgaaatgtgtctacggagtctgggatcatctgaagaatgtaggggatcacggtgtggaaaatctggacctcgattgggtcggcattgttccgggctatcgggagagcaggcgtattgagggagattatctgctgaatgagaatgacgtgctggagaaccgtattttcccggatgcggtagcttacggcggatggcagatggacgagcatgtacggggcggtatccgggatcttgacaagattccttcccggatcctgaatttcaacggatgttataccattccctggagatgttattatgcgaaggatctggagaatgtcatgctggcgggaagagatatcagtacttccaagatggcatacggttccacaagagttatgggaacctgttccgttggaggacaggcggtaggtacggcggcagccatggcggtaaaatacagatgtactcccagagagattggagagcatatcatggagttacagcaacaacttctgcgggatgactgctatattccgggctttcgtaatgaagacccgctggactatgcgcggtcggcaaaggtatccgcatctgcctgtacaggaaaaaatgtgccggaaaatgtattgaacggtgtggcaagaccggtgcaggaggagagtaactgttgggaagcacccatcggagaggaaggagccagtatctctcttgatttcggtaaaaaactggtcttacagcaggtgcagctgacctttgatacgaaccttacgagggagattatgccatccatgacgcgaaatgtcagaaatcgtcaggtaaaggggctgccggaggaactggtctgtgattacgatatccgcttttacagagaggggaaagaggtcatctgtaaggaaatccgcggaaattaccagagactgaaccggattgttgtagataacgtcatttgtgaccgactgacggtcacagtgtataaggcatatggtatcgatcgggcacgtatttttgaaatacgtacttattagagacatatttacaataaattggtacatattatacgctcaattattgacattgatttctggaattcgatatactgtaagtaatgggaactattggaaacagcggacactggcactatataaaatgttgatagggagagacgggacatggcagcacgatactcggaaatcgaagaatatattatggataagattcatacgggagaatggccggtaggctatatgatccccaaggaagtggaactctgtgaacagttcggagtcagtcgttctaccgtgcgtacagccatgttgcgattggtacaggagggacatctcaagcgtgtgaaacgcaagggaacgttcgtgacgggcccccgtgttctggaggacactacggtatttattgagagtttctttaatgaaatgttccgcagagggatagaggtagagacggaagtgctggagttccgctacatggaggcgacggaggatctgatggagaagttcggcgacaactgccagaaagtaatcaaactgagccgtctcagatatgcaaaggattccttcgataaaggccctattgtattaacgacatcctatctgccagaaggagattcgttcctgtttgattatgattttaccaaggcatccctgacaacggccctgaaagagcatcagaagaatcgttacagtatggaaaaggaaatgactgcgctggtattgggcggacgagaaagccatctgatggggatgaaggaaggatctctggcaatgttgatcacttctattacgaagaatgataaaggacaggtgattgatgtaacagagagtatctaccccttagagcggaataagtttgtatggaaactgaagctgtag

SEQ ID NO: 94 - DNA, 15870 bp, unidentified
  source 1..15870: mol_type = unassigned DNA
  misc_difference 10775: note = a, c, g, or t
  misc_difference 10776: note = a, c, g, or t
  misc_difference 10777: note = a, c, g, or t
  misc_difference 10778: note = a, c, g, or t
  misc_difference 10779: note = a, c, g, or t
  misc_difference 10780: note = a, c, g, or t
  misc_difference 10781: note = a, c, g, or t
  misc_difference 10782: note = a, c, g, or t
  misc_difference 10783: note = a, c, g, or t
  misc_difference 10784: note = a, c, g, or t
  misc_difference 10785: note = a, c, g, or t
  misc_difference 10786: note = a, c, g, or t
  misc_difference 10787: note = a, c, g, or t
  misc_difference 10788: note = a, c, g, or t
  misc_difference 10789: note = a, c, g, or t
  misc_difference 10790: note = a, c, g, or t
  misc_difference 10791: note = a, c, g, or t
  misc_difference 10792: note = a, c, g, or t
  misc_difference 10793: note = a, c, g, or t
  misc_difference 10794: note = a, c, g, or t
  misc_difference 10795: note = a, c, g, or t
  misc_difference 10796: note = a, c, g, or t
  misc_difference 10797: note = a, c, g, or t
  misc_difference 10798: note = a, c, g, or t
  misc_difference 10799: note = a, c, g, or t
  misc_difference 10800: note = a, c, g, or t
  misc_difference 10801: note = a, c, g, or t
  misc_difference 10802: note = a, c, g, or t
  misc_difference 10803: note = a, c, g, or t
  misc_difference 10804: note = a, c, g, or t
  misc_difference 10805: note = a, c, g, or t
  misc_difference 10806: note = a, c, g, or t
  misc_difference 10807: note = a, c, g, or t
  misc_difference 10808: note = a, c, g, or t
  misc_difference 10809: note = a, c, g, or t
  misc_difference 10810: note = a, c, g, or t
  misc_difference 10811: note = a, c, g, or t
  misc_difference 10812: note = a, c, g, or t
  misc_difference 10813: note = a, c, g, or t
  misc_difference 10814: note = a, c, g, or t
  misc_difference 10815: note = a, c, g, or t
  misc_difference 10816: note = a, c, g, or t
  misc_difference 10817: note = a, c, g, or t
  misc_difference 10818: note = a, c, g, or t
  misc_difference 10819: note = a, c, g, or t
  misc_difference 10820: note = a, c, g, or t
  misc_difference 10821: note = a, c, g, or t
  misc_difference 10822: note = a, c, g, or t
  misc_difference 10823: note = a, c, g, or t
  misc_difference 10824: note = a, c, g, or t
  misc_difference 10825: note = a, c, g, or t
  misc_difference 10826: note = a, c, g, or t
  misc_difference 10827: note = a, c, g, or t
  misc_difference 10828: note = a, c, g, or t
  misc_difference 10829: note = a, c, g, or t
  misc_difference 10830: note = a, c, g, or t
  misc_difference 10831: note = a, c, g, or t
  misc_difference 10832: note = a, c, g, or t
  misc_difference 10833: note = a, c, g, or t
  misc_difference 10834: note = a, c, g, or t
  misc_difference 10835: note = a, c, g, or t
  misc_difference 10836: note = a, c, g, or t
  misc_difference 10837: note = a, c, g, or t
  misc_difference 10838: note = a, c, g, or t
  misc_difference 10839: note = a, c, g, or t
  misc_difference 10840: note = a, c, g, or t
  misc_difference 10841: note = a, c, g, or t
  misc_difference 10842: note = a, c, g, or t
  misc_difference 10843: note = a, c, g, or t
  misc_difference 10844: note = a, c, g, or t
  misc_difference 10845: note = a, c, g, or t
  misc_difference 10846: note = a, c, g, or t
  misc_difference 10847: note = a, c, g, or t
  misc_difference 10848: note = a, c, g, or t
  misc_difference 10849: note = a, c, g, or t
  misc_difference 10850: note = a, c, g, or t
  misc_difference 10851: note = a, c, g, or t
  misc_difference 10852: note = a, c, g, or t
  misc_difference 10853: note = a, c, g, or t
  misc_difference 10854: note = a, c, g, or t
  misc_difference 10855: note = a, c, g, or t
  misc_difference 10856: note = a, c, g, or t
  misc_difference 10857: note = a, c, g, or t
  misc_difference 10858: note = a, c, g, or t
  misc_difference 10859: note = a, c, g, or t
  misc_difference 10860: note = a, c, g, or t
  misc_difference 10861: note = a, c, g, or t
  misc_difference 10862: note = a, c, g, or t
  misc_difference 10863: note = a, c, g, or t
  misc_difference 10864: note = a, c, g, or t
  misc_difference 10865: note = a, c, g, or t
  misc_difference 10866: note = a, c, g, or t
  misc_difference 10867: note = a, c, g, or t
  misc_difference 10868: note = a, c, g, or t
  misc_difference 10869: note = a, c, g, or t
  misc_difference 10870: note = a, c, g, or t
  misc_difference 10871: note = a, c, g, or t
  misc_difference 10872: note = a, c, g, or t
  misc_difference 10873: note = a, c, g, or t
  misc_difference 10874: note = a, c, g, or t
tcagatcgccacatcctgccactgtccgccgatcagttcgcgggtggatttgaacccggcctttttcagcagttcgaatgcttccgcacgtccgtcgttcaccaggtcgggatagtggcagtctgagtttaccatcaccggaatatccagctcatgtaagcggtgcagatagtcggtatgcgggtagacctcctgtttcttcacgaggtttttcgtgttgacttcgaccatcaggcccttttcggcaatcaggtgcagacagtcgttgaactgtttttgataccagtccgcttgcaggtcgaagccttcgcatttgtgcccgttcatgtatatcttgtccatgtgcccgacgatgtcgattccgcctgcctcgatcattcgccgtgtggaactgaaatagtgggcgaccagcttgcggatatctccgtcgtagtaggcgtcgacagacttctggtattcccggaaaggaccgtcgatacacaccatattctcttccgcaagcggctgtgcgatcggaagaaagtggatggaaccgatacggtaatcgagcggcagattgcggaagtaggggatggacgcgttgtagctttcgtctaagaaatcgatttccagtcctacgtatatttccaaccggtcactgtatttctttttcagtcgttctatttctgtcaggtattcgggcatgtcgtctttagacatgttccagaatgtttcgaacggcagtggtgaatgggatgaaaaaccgtaggcgcggaacccgtgcgcaacagcgaatttaatgaagtcttccggcgtgctccgaccgtcacagaatgtacaatggctatggtagttactgagttgcataaatttttacttgtaaaagggcaaagataatttttttatcccgaaagacaacctgtttgataaaaaaaggcttgattgctgcctaagggttagcggcagaatcaagccttgaaaaacacgtgaataatgaaaaatcgtatgttttattttattacgttcagttcttttccaactttgataaatgcagcgattgctttatccagatgttccgtttcgtggcctgcggacaactgtacgcggatgcgggcctggcctttcggcactaccgggtagtagaagccggtaacataaatgccttcttcctgcatcttggctgcgaaatcctgggataatttagcatcatacagcataacggcgcagattgcggactgagtcggcttgatgtcgaaaccggctgctaacatcttttcacggaagtagctgacgttgttcatcagtttcgtatgcaaagcatcgctttctttcagcatcttgaacatttccaggctggcacctacgatagcgggagcgacagagttggagaacagataaggacgggagcgctgacgcagcatgtcgatgatttctttctttccggttgtgaatccgcccatggcgccaccgaatgctttacctaacgtacctgtgaagatatcgactcttccgtatacattatattgttcagccacaccgtgtcctgtcgggcctactacaccggcagagtgggattcgtcaaccattaccaatgcgtcatatttttctgccagttcgcagattttgtccatcggagccacgtttccgtccatagagaacacaccgtctgttgcgatgatgcggtgacgttgtgcctgggcttcttgcaggcaacgttccaggtcggccatgtctgcattggcataacggtagcgttttgccttgcaaagacgtacgccgtcaataatggaggcatggtttaaagcatcggagatgatcgcatcttcttcagtgaacaacggttcgaacagaccgccgttggcatcgaaacatgcagcgtacaggatcgtatcttcggttttgaaatagtcggagatagcggcttccagttgtttgtgcagatcctgtgtcccacagatgaaacgtacggatgacatgccgtatccgtgtgtgtccatagcttctttggcagccttgatcagacgttggttgtcagacaggcccagatagttgtttgcgcagaagttcaaaacgtcgcttcctgcgtttactttgatgtcggctctttgaggagtggtgatgatacgctcgttcttatacaatccggcagctttgatgtttgccaattcctgagtaaggaaatctttcagtttaccgtacataactttgttttttgttagtatttttaattaagttgacaattatatctctattatcgcagacaagtggcaaaatattattcttgaaaccatttttttctttgtctctgatttgtctgccgatgcggcaaaggtcatattttttttgaatatataggctaaaaaatacaagaaattcataccggaatgtttttattctctatacctttgccatcgaaaaaacttaaaagaacatcaaacgcaatgaagaatgtattagtaattggttctaccggtcagattggatcagagttaaccatgaagttgagaggtatctacggtggaaacattgtagcaggttacatccccggacaggagcctaaaggcgaactgctggaatcagggccttctgcaattgtcgacattacaaacgaacagcagattgctgagactgtgtccaaatataaggtagatacgatttataacttggctgcactgctgtcagccgttgcagaagcaaaaccgcagcttgcctggaaaatcggtatgggcggtttgtttaacgtattggaagttgcgcgtgaaatgcattgtgctgtattcactccgagttcaatcggtgtgtttggcaataacacgccgaaagacaagactccgcaggatacgatccgtaacccgcgtactatgtatggcgtcacgaaggtttcaggcgaattgttgagtgactactataatatccgtttcggtgtcgatactcgttccgtacgttttccgggacttatctcctatgtgacacctccgggtggtggtacgaccgactacgcagttgatatctattattcggctgccaaaggtgagaagttcgtatgtccaatcaagcagggtacattcatggatatgatgtatatgccggacggtctgcgtgcagctattgaaattatggaagccgattcgacgaagttcgttcatcgtaactctttcaacattgcatccatgagctttgatcctgaaattatctacaacaacatcaaaaagtatgttcctgacttccagatggaatatgatgtggatccgttacgtcaggctatcgcagaatcatggcctaactctttggatgacacatgtgcccgtgaggaatggggctggaaaccggaatatgatctggattccatgactcaggatatgttggctaaattgaaagaacgtttcaataagtaagaattaattttccgatcattagcagatcggtaggaaagaagcgactgcccggtgtcggacagtcgcttttttgtttggatcgtttttatccagtattgtaggctgtttcaatcataatgtgtctgttgtttgtgcagggaatgactaagtcaaaagtgtatgaaaaattatgttgtaaaacatgaaatggttaaatcaggttaagagaaagcttttttttgtggaaatattatgctgcataacataaactctctatatttgcactgtgtttttcatggtattagatttaaggttaacaatgaagattggctgtctgtgaagatagcctttttttgtttatacccggttgatgttgtttcctccgagaagcgatcattttatccgaattgcccgttcttttggtattcttgattatatttgtatatctgaaaagattcattgtaataaaaatatctttatatggaaatgtacaaagcaaatgacaaccggtatgccgatatggcttataggcgttgtgggcggagcggattgctattgccggtcatctctctgggattgtggcataatttcggcagtgtagatgtgttcagtaactttattcagattgcgtatgccgctttcgacaatgggattacacattttgatcttgccaataattacggtcctgtgtatggatcggcagaggaaaatttcggccgtatcctgaagaaaggtctgggacaatatcgggatgaacttgttatttccacaaaagccggatatgacatgtggcctggtccgtatggcaactggggaagtcgcaagtatctgatggcaagccttgaccagagtttgaagcggatgggattggaatatgtggatattttctattcgcatcgtccggacccacagacgccggtcgaagaaacgatgggagcattggctgacatcgtccgccagggaaaagccctgtatgtcgggatatcgaattacactgccggacagacggaaaaagcacttgccgtattgaaagaacatcgtgtgccttgtttgatccatcaagcgcgttattcgatgctggatcgcaggatcgaaccggacttgttgcctctgttgaagcaggaaggagtagggatgatcgccttctcgccattggcacagggcatgttgacggataagtatctgaacggtattcccgataattcgcgtgcggccaaatctacgggccatcttcaacgtgaacaggtgacggaagaaaaaataaataaagtaagacaactgaatgaccttgccaaacaacgcggacagacgttagcggaaatggcgattgcctggctgttgaaagacgaccgggtgacgagcgtcctggtgggagccagttcggttgcacagttgatagataacctgaaggcgttacaaaatacagccttttcagcggaagaaatacaaatgatagaaaatatattacagtaatatacactgataaatcatcatttattaatccaaacaattaatgaaaccattcttatatcaggttgcatcccttttttattctgaatacggggcggaagtgagccatctggcctttgttttcccgaatcgccgtaccgggctgttcttccagaaatacttgtcggaagtatctgagaagcctcttttctcgccgacgatcctgacgatcaacgatctgtttgtacagttgagcggaaagcaggctgccgatcggatcagcatgctgtttaaactatatgatatttatttgagacatagcggttcttccgaaacgttcgacgagttcttgtattggggggaaatgctgctgaatgattttgacgatatcgataaatatatggtagatgcccgtatgctcttcaccaatgtgacggacctgcgtgagatagagaatgattttagttttctgagccctgaacaaattgcggctatccggactttttggtcttctttttacccgaaaggagatacgcccaaccaggaacaatttctggcggtctggcagattttatatgccctatataccgatttgcgggaagcgcttgccaccgaaggcaaaggatatgaaggtatgattttccgggaagttgtcgaacagatggagaaagacgaatgttgcgacctgccctatacaaaggttgtatttgtcggactgaatgccctctcggtggctgaagaacgtttcctttccgggttgcaaaaacggggaatagctgatttttactgggattacgcctctccgaaagtgacggacccagataataaagcctcttacttcgtggagcgcaatttgcggcaattcccgtcgcaattaattgaaaatggacaattgactattgacaatgaagatgacgacaaaaagaagatcgaggtgatcggcatcccttccggaatcggacaggcaaagcaagtgtgcagcattctgaacgagctttgcaaggaagacgaaatgagtgcggaagaagcgttgcggacggctgtgattctgccggatgaacatttgttgattccggttctgaatgccattcccgaacagatcaaacggatcaatgtgacgatgggatatccgttggccggtacaccggtcgcatctttgatggaatatattctggctttgcaaaagaatattcgttatgtggaccggaggccggtgttctatttccgggatgtcttgccaatcctgaaccatcggtatatctcgactacttctccggaggtggtttctaatctggtaaaagatatttcagaaaacaacaagatttacatatcgtatgacgatctgaataagacgccattgttgtccatcctttttactccggtgactgcggtggaaactttctccgattatttgattaacgtgttgcaggaactgaataaagctgttgaaggtggaaagttgaaagttgaaagtgtaaatagtgacactgagccactttcaactttcaactctcaactctcaactattaacgatatcgaacaggagtttatcttccattatttcgctacggttaaccggatgaaggaagtcatgcgggaggcgaatgtagaaatgaaaatcgacacctatttccgtttgctgaaacgtgtgacggacacaattacgattcctttccatggtgaacctctttccggtttgcagatcatgggggttttggagactcgtgcgcttgactttgaccggttgattatcctttcgatgaatgaaggaattttcccgttgaggaaagcggctaattcatttattccttataatcttcgtcgtggattcggtttgccgacatacgaacatcaggacagtgtttgggcgtatcatttctatcgtttgatttatcgtgccagccatgtcagtctgctttatgatacaagaagcaacggattgcagacaggcgaggttagccgtttcgtgcatcagttgcattatcattatgaggagccgatacagaataagctggttgtttacaatgtctcttcttccaagactcctgccttgcaggtagctaagacggaggaagtcatgaaccgtctggctgatttccggagtggtgggacgcgggcgatatcggcgagtgcagtcaatacctatctggattgtccgcttaaattctatttctccgttgtcgagggaatacgtgaagaagaggaggtaagcgagacgatcgaaagtaatgtttttggaagtatcctgcataaggtgatggaagaattgtatcagccattctgcggaaagatggtgacggctgatctgctgaaagcgatccgaaaagatacgcctatgttgacgggagcagttgcccgtgcctttgccgaaattttctttaaaacggacattgttcgtccactcaccggacaaaacttcctgatcggcgagatgattcgcaaatatgtggagaaagtgctggaacgtgacgcaaaacagactcctttccgttatatcgaatcggaaaagaagataaaatgcctttttccattgacggataaaagcaatatccagttgaaaggatttatcgaccgtatagacgaggtacgcgatgtcgtccgcattattgactataagagtgggggcgggacgacgcagtttacctctgtagaagctcttttcgacaaagcagatacggatcgttccaaagcggttatgcaggtctttatgtatgcatggatgtataacaggtcagttcagctttcaacagctattcagccgggtatctattatatgaggaccctcttttcttcctctttcgatcctggaatttaccatcgtacagaccggttcaaaacagaacaggttttggacttcgccaactatcgcacggattttgaagacagcctgcgaaattgcttggatgaaatcttcgacacagaaaccccattcgtgcaaaccccgaacggcaaagcctgcatgtattgtccgtttaaggatatttgcgggaaatagtatttttacagatttcccatatattcatccacaatttcattcaggaagcggttgaatggaagaagctttcgaaaacaatcgatggtttcttccatccagtccggctggctgaaaaaactgtcgggcttaatacctataacgctgaagtctttgtgccttaatatatgaccgtaaggagaatcggaggggaaaccggccgggatacgttttagcatgtccccttcgagtgacgggtacagagctttgaaggaaggctcttcgatgatggaaacaaattcatctatgttattgtatatttcacgtcgaaggactttcaatatttccggtttgggataccagataccaccggacagtacgcagtattccggttcaagatgaaagtagtaagctccccggatactatgacgtcctccttgagcaatacaggctaacatataagtcttgtaaggcgacttgtcgaggctgaagcggatgtcgcgattaatacggaacagacatttccgggcatccaatccccgtatatcaggatcaaatacgctgattcgttcgattaactcttgtacttcgttgataaaagcacagcgaagtttgtcatatcgttctctattttcatggaaccaaacggtattattgtttcgtcgtaaatcgtctaagaatcggataatttctgcattcatattaggatattcttttttttattgtatttcgtatctccattgtttcggagtcatctgtttcatctttttgaaatagcgattgaagtagggaatgtcggtgaagccgcattgccaggctatttcgttaatgtccttatccggaaagttgcggagtaaagtgccaacggcctctatccggtattcgttgatgaagtttgtaaacgttttgcctgtttcacgtttgaaaaacgagcagaacgccgttgtgctcatgctgattacgtttgcggcgtccgaaagagttattttctccttgtaatgctcgatgacgtatttgaagatcagttgcatacgttgcatgtttttggtaatgccgttgaataccgtttcctgcaaaccgatagggattaaatcggttgtggttccgatttgttgcaggatgcggatcaacatcagcatcctttcgcttgcattcaggaggttcatttcttctaagcaggatttgatctttccggctgtttcgcctgtcagcaggatgccttgctggattgccgataaccggtgagcggcatattcccattcggtaaaaaaagacaggccggtttgtagcaagtcgggattgaattgcacaactatgcatctccgttttccatcaggctcgcagctttcggggttatacatccaacaatgtggttggttggtcgggaccagtacgacttctccctcctcgaacggctccagaaagtcgcctatcatccggtagcctgaacctttcacaacataacatatttctatttcgggatgaaaatgaagaggcatttcgtctttcgggtacaagctggaataatcgtagcgtaatgaggcacaactatcttttttgatttgttcgaattttagtttctcgtgcatgtcggatgaactttctgataaaacacagtaaaattagacaataattgcataatctgcgacaattacacttaataattttgttgtttctttgcggccggaaaaacagaaagattgaattaggttatgaagaaaggtttgtatgcattgtcttttggcacatttgggctggggattgcagagtttattatgatgagtatcttgccggatgtggcggcaggatttgatatttccttatccgaagccgggcatcttatttcggcttatgcgttgggtgtatgtgtgggagcgccgttggtagtggtggtggccaggagttggccgctacgtacgatcttgctcgctttggttgggctttttgttgccgggaatctgcttatggctctgtcggccgattattggatggggttgtgtgcccggtttgtatcggggttgccgcatggggcttatttcggagtcggttcgattgttgccagccgtttggcggagaaagggaaaagcacttctgctgtagctattatgattatggggatgacgattgccaatttgttcggtgtcccggccgggaatttcctggggtactttctgtcctggcgtttggtttttgtgattgcagcgttgtggggtggcgtaacgatttggtttatccggaggtgggttcctgttttgcccgccctgccggcgacgaatctgaaagggcagtttcgttttttgagaaggccggaaccgtggatgctgattgctgctaccatgttaggaaacgggggagctttttgctggtatagctatgtcaatccgttaatgacggaggtgtccggtttcagtgtcgggacaatgcctgtattgatgttgctggcgggtgcgagcatgtgtgtcggtaactatttgggagggcatttgtctgatcgttttacacctggtatcgtagcgatgtccatgcagtttctgatgtttgcatcacttctgctgatttatttttttgcttcgtacggctttttgtccgctttgctgatgtgcgtttgtactggttgcctgtttgcagtttcttctccacagcaattgttgttgcttcaatattctcctggtggagagatgatgggcggggcgatggtccagcttgcttttaatttggggaatgccgtgggggcttattttggaggattgtcgatcgaacatggggcagggctggaaagtacggcattgatcggttcgttttttgccctgttaggaactacggtatttctggtattcaactatatggtgtttaaacctcagaggaaattacttttaaaggggggaatataatttccgaggatcaagacggtgtttttggagataaaaaacagccgtccgaaatcgggacggtgtttttggagataaaaaacagccgtccgaaatcgggacggtgtttttggnnnnnnnnnnnnnnnnnnnnnnnnnnnnnnnnnnnnnnnnnnnnnnnnnnnnnnnnnnnnnnnnnnnnnnnnnnnnnnnnnnnnnnnnnnnnnnnnnnnnagataaaaaacagccgtccgaaatcgggacggctgtttggatttataatgtctcttgtttcagttgttcgacgaaacgatcgattcgctgtagttctttcggaatatcgattccctgcggacagtgtggattacattggttgcaactagtacaatgatctgcttggcggagtttcggtacactgcggtcgtacccgatcagataagcccggcgagcttcgcggtagttttcatcctgtccgctctgagggacattcccctcgttcacacatttattataatgaagcaaaattcccggaatatcgataccgtaaggacaaggcatacagtatttgcagtcgttacatgggatggtcggatactgcatcatcaagtcggcggtgtcgaacaagaaacggttttcctcttccgtcaacggttgcaacggacagtaagagcggaggttgtcttgcaggtgctccatgtaagtcatgccgctcagcacggtgagtacgccaggaaacgagccagcaaaccggaaagcccaggaggcgacgctccgtcccggttcgcgttgcttcaggcgggcgacgatatggtcgtgcacgttcgaaagccgtcctccgaggagtggttccatgatgatggcgggaatcccccgtttctgtaattccccgtacagatattccgcatcggtgtttcgcgggttgatctctttggcatgtttccagtccaggtaattcaactggatctggacgaaatcccattgatattcgtcgtgtttcgaaagcaaataatcgaacacctctatatctccgtgataggagaaacctaagtttcggatacgtcctgccttgcgttcttcgagcaggaagtcgagtatgccgttcttgacataccggttttcataggcttctataccacccatgccgatcccgtggagcagcatataatcgagataatcgacttgcagctccttgagcgaattgttatacatcgcgatagaggcttcgcggctccatgtgtcgggagagaagttcgaaagcttggtggcgatataatatttgtcgcgcggatagcggctgagggcgatccccatagcatgttccgaacgtcctttgcagtaggcgggcgaggtgtcgaagtagttcacaccgtgctcgatggcatagtcagtcagccggttgaccatctcctggtcgatttcgtcatcgctatctcttgcgctgcttttggcaatagtcggcagacgcatgcatccataaccgaggatggaaactttgtcttttgtggacggcgtcgtgcggtatgtcatccggtccgtgggaataggggtggagcttcccgaacctgaggccatctcgctgtccgaactgcacccggagagcaacggggcggtagttgccgtgctgattcctacaatcttcaggaaatcgcgacggtttatcgcttgatgattgtctttttccatatgtgatgattcttttatttcttgatcaaatattccggtgttgttcgtgcccttccacataaatggcgctgaacggacgcgacgggcacaggttttcacaggctccgcagccgatgcatttttcctcgtttacgaccggaagttgaggcgaatccgggtcgttcgggtcttttgccaccatcaagatcgcctgggtagggcaatggcgggcacagttgccgcaagtgacaccatcccggttgacgatgcaattttcctgaatcagtacggcatgtccgatctggatggccgttttgtccgctttcgtgatcggacggatcgctccggtcgggcaaacttccgaacatttgacgcattcgggacgacagtatcctcgctcgtacgatacttctggctgcataaatgtttgaaggttccccgaaggacgcagcacatggttcgtacaaaccgatacacaaagctggcacgcggtgcaatgctgggagaaattggcagcgctcagcgaacccggaggggtgatcggggttgtccggtccggtttctttttatcttcgatgatggccagtccgccgtcgactttcttgtccgggagttgtactttttcttgggctttcaatgcggcagaagtggcaagtaatgccgatacggtaaagaacttgcgacgatcgggcttgtctacgaccggttggttggtctgtgtttcagccttgtttgtttttctgcgtgtatatcggatggccccttgtcggcatttgtctatgcagtccatgcaatcgacacagcggctatagtcgatctcgtgtactttcgcattgatacaggctgctttgcaattacgggcacacaagccgcaaccattgcatttggacgtatcgataaccggtttgaaaacggaaaaacgggagatcaatcccaaaaacgttcctaccgggcagatcgtgttgcaataggttcgcccattccgccaggcaagtatgatcagtataatgaaggtaactgtggcaatgataaaggttgggaggctccgtagccagacttccgtttcgtagaaagcataattgtctgcccgttctgccaagtaggccagaaagttgtttccccattgccagaggggtgcgaataagttagaggcgatacgcccgtaagcgctgtaaggtgcgatcaatgccgcccatgctcctaacccgctgatcatggcaaggataaatatcaccatggctccgtatcttaaccaggacaaggcgggggaataacggaaacggtttttcttccgtttccccgcaagccatgaaacaacatcctggaatatgccgagagggcagattacagagcagtaaacccgaccgaaaatccaggtcaatacaatgagaaacagtaccacgccgaggttgagtgccaataccgccggcaggaactgtactttcgccaaccacccgaaccatgcatgcaacgtccccgtgaaatcgagaaacagcagggttacaagcgtaaaacagataagtgcagttgtaagtctgatcgttcgcaacataataaactctttttagatagtctgttattttatgttgcaaacataataaaaggaaatggtttgcaacttacacgaattacggattgatgtaccaatattacggttttgtcaacttctgcaaaaagtctggctgacaaaccttagaacttcaggcaaggccgtccgccaataggtccagctatggccgccgtctcgtactcggaattcatgcctgatccctttctgcttcatgacctggtgcacctgcatgtttccgtccagcaggccgtcgtcatcaccgcaatcaatgtaataacgaattttgggcaagttgttttgattccagtcggaaaggatcttcaagacattgttttgcttccagtgttcgtctcccggcccgaacaggcggttgaataaatccttgtgcgatttgttttttcttgcctccatgactgtgtcgtcgaaaacggcggcactcaacggagcacatgcgcagaacatgttcggatgatgcaagctgtacaggaatgatccgtagccacccatcgacaatccggcaattgcccggctttctttgtcactgcgaatccggtatgttttttccatataggggataagttcttcaaaaaacatgtcttcgtaaggtacttttccgtcatactggttgatataccaagtgtcccatgcgtccggcatgacgattatcatcggcacggcttcctcgtttgcgatggcacggtcggcaatcgttttcatttgtcccatctgtatccagttggtttcattgtccgtgtaaccatgcaagaggtagaggaccgggtaattccttttcgaggtgttgtagtcggaaggcaggtagatggagtaggaaactttcctacctaatttgttactttcaaaagagagcgattcgaaaactgtgctctgcgaatatcctgccatattgagtagaaagcacaggataagatggaggtaaattttgtttttcatatattattaataattagatttgcttgtctggacaaagtagaaataagagaagagagtttgtctgaaaacttattaggtttcgacatactctctttttcttatttggaattaatctgccatcggatagggaaattcggtcaaccctttgtacatgaattgataggtcggaacttcgattcccaattcttgggcagttcgtacgacatagcctgtcaatgtttccacttcggtgcgattgcttttttgaaaatcactgtgcatggaggttgtggagttgttaggcatgatcttctgggcgtcgatggcggagaatacttgaccgtccggcagacggatccctttggcttctgccacgcttttgagttcataacctaatgtgatgaacagatcgatatggttatttaccacttcgccaatcgtttcattgaaataggaggtgatagtggcggcggtcgagatcatgaagaatttcttccagatttccaagtcaatgtcatccggtattgtggtaaggatacgggcgttggccaatatatcctgtaagtctttctgtcgtttcttgtttccttgtttacttccgaagaacatccggtcctttatggtgaacttttccactcttcccggtctgaccaagcgggaaccgatgtaaacgcatcctttccaaacttcattgttcggtaatagcttttgtatgcgttccgctatatccgctccgttcagcaggggaatgataaccgtattagggccgatgatcggagtcagctgaactatattctcctccaagtcgtagcttttggtacagcaaaacaggtaatcgactggtcctatttcagcaggattgtcggttgcgagggttggttttgctttgatcgtcaggaatgtatttttgacttcgatgccgttcttacgtatctcttccagattttcaccccgggaaatgaaatagatgtcaatatcttcagagtctttgtaacgggcagctaatagtcctccgtagtagccgcctacagctcctataccggaaatcgctattttagttttattcat

SEQ ID NO: 95 - DNA, 15303 bp, unidentified
  source 1..15303: mol_type = unassigned DNA
atgttcaacaaacaccctaaaggtctgattgccgcatcttttgctaatttgggcgagcgtttcggcttttataccatgatggccattcttgtactttttctgcaagccaagttcggactggatggaaaagaggcaggtttgatctactcaacattttatttttctatttacattctagcattgataggtggtattattgccgacagaacccgtaattacaaaggtaccatctttgccggtattgttttgatggcggtaggttacttgatgctggccatcccgtctcctacaccggttgccaataagaccttgtttctggtgattacttgtgcagccttgtttgtcattgctttcggaaatggtcttttcaagggaaatcttcaagcgctcgtagggcagatgtacgacaatcctcagtactccagcatgcgcgattccggtttctccttattctatatgttcatcaatgtaggtgccatctttgccccgtttgccgcagtaggcgtgcgtaactggtggttgtccacattcggctacaattatgatgccgacctgcctgccctttgccacggacatctggcaggaacgctgactcccgaggctgtggacacttatagcgcattggcagccaaagccactatttccggaacacccgtaacggatatgacggtatttgccaatgaatatctgaacgtgttcaccactggtttccattatgcattcggtgtagctatcctggctatggttctctctttggtaattttcgtcatcaacagaaagaaattccccgatcccagcaagaaggttgctgcaaaagcgggcgatgccactgcagtggagatgaatgcacaagaggtaagacagcgcatgtatgcattgtttgccgtattcggtgtggtaattttcttctggttctcgttccatcagaatgggttgacactgacgtattttgccaaggaatatacagatttgaatttattcggcatggctatttcagctgagctgttccagtctttgaacccgattttcgttgtatctctgacaccggtcatcatggctgtctttgcagcacagcgtgccaagggtaaagagccttccactccgcggaagattgccatcggtatgggtattgctgccaccggcttccttataatggctatcggttcttatgtaagcaacttgccgatgcacaaggatataatcgctttgggtacctctccggtgaaggtgactccgctgttgctgatggttacctatctgatattgactgttgccgaattgtacatttctccgttgggcatttcattcgtgtccaaggtggctcctcccaaatatcagggtatcatgcagggcggttggctcggcgctactgccattggtaatcagttgctcgttatcggtgctatcctttacgaaagtattcctatctggatgacgtggacggtatttgtagtagcgtgctgcatttcgatgttcaccatgctgttcatgctgaaatggcttgaaaaggtggcgaagtaatcggaaacgaaagataaaactaaaggctgcgcaatgttcgtaatgaactgcgcagcctttagtttttggagggcttttaatgccggggctcagatttccagtcccatgatgtagtcattcatgtaatatccgtttcctatcgggaaatccccttcacggagtttccgcattcccatatgttcgtaaaactgcagtgccttgttgttacggttcacattcaattccatcagacaagggccgggatgcacttccttgatgtacttgatggcttcgcgaaagaggaaactgccgcaatgtgcaccctggtaataggggagcacataaatcttttgcaggtggaataaattttctccttgctgctgtacggacacatagcccgccgcttcacattcttcgtaggccaggaagtagacgtgaccttcctcttccatttgcttgcggatattgtccaatgaatacatccattccatcatgtagtcggtctgttcgggagtaaggatatccttatacgtgacagggaatatctgctgcgcaagtttctgaatcagtgcgcagtctgctgtcgttgcttttcttatggtaaacatatcggttgtatttatactgtttggggtgtaaagttaagccttttttgtgaaacaatcgttatctttgcagaccgttaccgaactaactaattttgattttaaaaattatggcatttacgagcaacattatgattgtccgccacagattactgaaggaactggtaaagctgtggaataacaacgaacttgtggataaaatagaccggctgcccatcgagctgagtccgaagaggtccaagcacgcgggacgctgctgtgtgcacaaagagcgcgcggtgtggaagtacaagtcattgccgcttctgggactcgatatggaggacgagacggatgagctgacccccttgtcggagtacgctgcccgtgcactggacagagcggaaaatggcaggccgaaagacaatatcatgtgtgtgattgacgaagcttgttcggcatgtgtgcagattaactacgagattacgaacctctgccgcggatgtacggcacgcagttgccaggtaaattgtcccaagaaggcagtgcacgtcaaggagagcgggcaggcatggattgaccatgatgcgtgtatcagttgcggcatctgccataagagttgtccctaccatgccattgtttatattcccgtaccttgtgaggaagcttgtcccgtgaaagccatcagtaaggatgagaaggggatagagcatattgacgaaagcaaatgtatctattgcggaaagtgtctcaatgcatgtccattcggagcaattttcgaaatatcgcaggtgttcgacgtgttgcacagaatccgcaagggtgagcaggtggtggctatcgtggctccgtccatcctggggcagttcaagacgactattgaacaagtatatggcgcattgaaacaggtcggttttacggatgtcatcgaggtggctcagggagcgatggataccgtcagcaacgaggcgcacgagctgattgagaagctggaggagggtcagaagtttatgacgacttcctgctgtccgtcttatatagagttggtgaacaagcatattcctgccatgaagccttacgtgtcgggcaccggttcgccgatgtattatgctgcccgcattgctaaagagaagtatccggatgcgaaggtggtcttcataggtccttgcgttgccaagcgcaaagaggcgcagcgcgacgaggcggtggactttatcatgactttcgaggaggtggcttccgtgcttgccgggctggatattcagatggagcaggcaaagccctattccatgagtttcacttccgtgcgcgaggcgcatggttttgcgcaggcaggaggcgtgatgggtgccgtgaaagcctatctgaaggaagaggcagataaaatcaatgccgtacaagtggctaatctggataagaaggctatcggtgcgttgcgtgcttacgccaagtcgggcaaggctccggggcaatttattgaagtgatggcttgcgagggtggttgtattaccgggccatgttcgcataatgaaataactgccggaaagcgccagctgacgcaggagttggcaaagagaaaagagacgtattagccctttgtccgtttatatgaagcatttgattgacaaattgcggagcaatcgcaggctggatgccgaagagtataaagccttgcttctttgtcgggacacagaacttgcagcctacctgcaggagcttgcccgggaagaagcgcttgcctgctttggcaataaaatcttcattcgcggactgattgagataaccaaccgttgccgcaataactgctactattgcggcatacggaaggagaaccggaacatagtccgttatgagctggcgcaggaggagattctttcgtgttgccatgaaggctatcggttgggtttccgtacctttgtgctgcaagggggcgaagcgccggcggtgaaggatgaggggatggtggagacagttgccgccatccggcaatccttcccggattgtgccattaccttatccttgggcgagaaatcgcgggaagcctacgaacgtttcttcctggcaggtgccaaccgctatctgttgcggcacgaaacctgcaacgaagggcattatcaccggcttcatcctgcggagatgtccctttcccatcggttgcaatgcttggactggctgaaagagataggctatcaagtgggaaccggaatcatggtgggcagtccttaccagacggtggaccatttggtagaagacattctcttcatcgaacggtttcagccggagatgataggcatgggaccttttcttccgcatcacgatactccgttttcctcttttccgccgggagatatggagttgacgttgaagttgctttctatcttccggttgatgcatcccgcggcactgatacctgctaccactgccctggccacacttgctccggacggacgggaacggggaatattggctggcgccaatgtcgtgatgcctaatctttcgccttctcatcagcgggcgaagtactccctctatgataacaaagcttctgcgggtgccgaagcggcagaaggtttgctaaaattggaggaacaactgaaagggataggctacgaggtatcaaaagagagaggagattatgagaatggagaattgaccgttgataattgataattttcaaatcttcattctttattttaattaccaattatcaatttacgaagtgtataacataaagtcaagacaagcggaagaattcatcaatcaccaggagatattggatacattggagtatgcgcaggcaaaccgcaacaaccgtccgctcatcgaaagtttgattgacaaggctgctttgtgccaggggctttcccatcgggaggcggccctgctgctggaatgtgacgagccggaactggtgcagcgcatctatcatctggcacgtgaaatcaaacggaaattctatggcaaccgcattgtgatgtttgccccgctttacctttccaactattgcgtgaacggttgcgtctattgcccgtatcatgccaagaaccgtaccatcccccgcaagaaactctcgcaagaggagatacgccgcgaggttatcgccttgcaggacatggggcataaacgcctggcgctggaagccggagaagaccctcgaaacaaccctatcgactatatcttagagtctatccgcaccatctacagcattcatcacaagaatggggccatccgccgggtgaatgtcaacatagccgccactacagtggagaactaccggctgctgaaggaggctggcatcggcacttatatcctttttcaggagacttacagcaaagagcattacgaagccttgcatcccacgggaccgaaaagtaattatgcctaccacaccgaagcgatggaccgtgctatggagggtggcatcgacgacgtaggtatcggcgtattgttcggtctgaacacctatcgttatgacttcgtaggactgctgatgcatgccgaacatctggaagctacctttggcgtgggtccgcataccatcagcgtgccgcgtatctgtccggcagatgatatttcgaccgaggattttcccgatgccatctcggatgagatgttctgccgtattgtggcggttacccgcattgcggtgccttatacgggaatgattatttccacccgtgagtcggaagccgtacgccgtcgggtgctcgaactgggcgtttcgcagataagcggcggttcgcgcaccagcgtgggaggctatgccgtgccggaagccaaagaggaagattcctcccaattcgatgtgagcgaccggcgcacgctggatgaagtggtgagttggctgctcgacctggggcatatccccagcttctgcaccgcctgctatcgcgagggacgtaccggagaccgcttcatgtcgctcgtcaagcgcggacagatagcaaactgctgccagcccaatgcactgatgacattaaaagaatatctggaggactatgcctcctccgaaaccaaggagaagggcatacagctgattcgtgaggagatggagcatatcccgaaccccaagatacgggcgatagccgaacgtaatcttcaggagataggggaggggaaaagagactttagattttagatttcggatttatgaataatacacctcgttccaaccgcctgcacattgccgtctttggacgacggaacagcggaaagtccagccttgtcaatgccttgaccgggcaagacacggcattggtatccgcaacgcccggcactactaccgatcccgtaaccaaagccatggaagtatatcctttgggcccgtgcctctttatcgatacccccggttttgatgacgacgaaggcgaactgggcggtatgcgcgtggagcgtaccttaaagacggtggagaaagcggacatcgccctcttgctttatgaagctgacggaacgctggaacagcaatggctaaagctactggctgcgcgcgaaatccccgtgatactgatactgaataaagccgattcccgtcaagacaccgcttccgtggtgcttcggattgaaaaggaatgcgggcaggctcccgttgtggtcagtgccaaagagggtaccggcattcaaggcattttcgatgctattctcgaaaagcttcccgagaattttggtgagcagactatcacgggcaattgggtaagtgaaggagatgtcgtcctgctggtgatgccccaggatatacaagcccccaaaggtcgtctcattcttccgcaagtgcagaccatccgcgaactgttggataaaaagtgcttagtgatgagctgcaccaccgacaagctgcaagcctccctgcaagcccttgcccgtccgcctaagctgataatcaccgattcacaagtattccccatcgtctatcaacaaaagcctgccgaaagtagtcttacttccttctcggttctttttgccggctacaaaggagatatcaatgccttcgtggagggagctgccgctatccatagcctgaccccccaatcgcgtgtactgatagccgaagcttgcacccacgccccgctgaccgaggacatcggtaccgtcaaaattccccgcctgctacgaaagcgcatcggcgaggaattgcagatagactttgtatctggaaatgactttcccaaagacttgtcccgatatgatttaattatccattgcggcgcttgcatgttcaaccggaagtacgttctcaatcgtatagcccatgcccgcgcacagcacatccccataaccaactacggagtagcaattgcgagtctgaccggtatattggataaaattgttatctatcggtaaatatccctttccctctctgttcacgttactgatgttatagagtagcgtgaactacttttcttgttaataatgtttaatatatggtactttgtaatgcaaggtactgatataatacatatatttgtgccatacaaggaacaacaatagaatgaataaggacactcattactctattgcgcagcaaaatagtaaatcgtaaattgtcaaatagtaaataccattatggatgtaaacaatgtaaagtcgcaaatgcgcaagggcatgcttgaatattgcatcatgctgctgcttcacaaagagccggcttatgcttcggatatcattcagaagttgaaagaagccagactgattgtggtggaaggtacactttatccgttgctcacccgtttgaagaacgacgaccttttggggtatgaatggattgagtctacacaaggtcctccccgtaaatattaccggttgacggaaaaaggagaagtctttctcggtgaactggaaacatcctggaaagagttgaacgatacggtgaatcacatcagcaattcttgaaatgcccacagagaatatgctgcattcgccgaatggtaaatagtaaatcgtaaatagtcaaattgtaaataaatagtgtgttatgaaaaagacattaactgtaaatttaggtggaaccgttttcaatattgatgatgacgcataccgtcttttggataattatctgagtaatctcaagatgcacttccgcaaggaagtcggtgccgacgagattgtagatgatattgaacgccgtatttccgaactctttgccgagaaattgtcggccggttcgcaagtaatcacgatagccgatgtggaagaggtgattgcccgcatgggaaagccggaagatatggaggcggaaggagagagtgctagtgccgattccggcagcacgagtgccgggggcggctatggtgccggtgcttggaacagcaataccgcttatggcactacacgccgtcgtctataccgcaatccggatgacaaaatgctgggtggtgtcatcagtggaatggctgcctacctgggatgggatgtaactttacttcgactgttactgcttgtcatcttgatttgtggggtagggacattgataccggtctatatcgtgtgttggctggttataccggaagcccgcacagcggccgagaagttgagtatgcgtggcgaggccgttacggtggagaatatcggaaagacggtgacggacggttttgagaaggttgccaatggggtgaatgattatatgaggtcggacaaaccccgtactttcttgcagaagttgggagatgcattggtgatgattgtcggctggttcttgaaaatctgtctggtgatatttgccattatctgcagtccggtattgtttgtatttggagtggtatttgtggcgttgttgtttgctgcgatagcggtggctgttggtggcggtgcggctctcatttcctttttcccgatggctgatgtggtactgcctacttctccgttgtctgccattgtgatgtacattgcaggaatcttgctggtaggaattcctttggtcagtcttgtatgggccatcttcagtcagatattcaaatggcagccgatgaattccggtttgaagtggacgctggttattctttggattgtaagtgcggcttgcttcggaatctgttttgcagtgcaaggggctactttcccggaattgggtatctttaacttctgagaatagtaatttcttttttaattgatatcgtgtttgtaggaatctgatttctataaacacgatattttttatttcaatgtaattatttgttatacagtggaatatttcgtttggaaaaggtgttttttaaacgttcgtttaatgaacgcaaagataacgtgtatttttgaatctcgcaaaatgtttaataaaaatattctataaatttctttttagtgagtataatactttgtcagtaagcctattgcattgtatttctctaacttcttccttttactaatttttaagtaatcttccctctttagttttcttaaatattgacgttcaaaaaacgaacgtctattgaacgctttttgcttgcaatagattcgtttacagcattttacctgacaggtaatgaatgactgcaaaaaatctgttgacaagaagggcataaagcttgtcgtattctacataaagtgtccgcaagtaattgaatttcaagtgtatgcaagaggttcaaagccccaggagaacacccttgtctgaacaaaagcataaaaatgggaatagagaaagaggtcgaaatctggtatgctatgcgtgccacctaccgcagagaaccagatgccatgcatctgctcaagaaagaaaatttgggctgtttcattcctatgcaatacaagatatgtataaaaaaagggaaaaaagtccgtgctctggttccggtcgttcataatctgctttttgtccatgcccgtccttccgatgtgcagcgtgtaaaatctcaagtcacttatctgcaatatatcaccgatacccgcagtgggcagaagattattgtcccagacggtcagatgcagcgtttcattgccgtatccggcacttacgatgatcatcttctttattttcaaccggatgaattgaacttgtccaaaggcaccaaagtccggattaccggcggtgaatttgaggggcaagagggtgtgtttctgaaggtgaaaggcgcacgtgaccgtcgcgtggttatcgaaatacaaggtgtcatagctgttgccatggccactatccatcccgatcttatagaagtaatcggctgaactttaatttttaattcttaattctataattgcttatgtctctttccgaagaagcaatcactcttcagcgtgctgcgcacgaactgatgtatttgggtatggacggcagtcccgtctatagcgatgacttgtcacggcggaacggtgaggtctaccgtcttaccatggctttataccggtcgggtgtaaaaggcactaccatcgaagagcaggcaaatgtctgtcttgcccttcttatgggttacagcgcctcttttgtggaccatggcgaaaagcagcagcatgtccaggaagtgctggactgttgttgggatgtgctcgacgcccttcccgcttccttactgaagctccgtctgcttaccgcctgctacggtgaagtgttcgacgagtctttggccgacgaaggccgttccatcatcgcctcctgggattccttatcacttactcccgaacagcaggaagcggttgatgaatttcagaatgtgacagacaatccctatccatgggaatatatcgatgaataaaacttttcatataatgcttaacaataaatccgtattgattaccggaggaacgggttccttcggaaagaagtttgtggaaaccattctccgtgattatccgcaagtaaagaaaattattatttactcccgcgatgagctgaagcaatttgagctgaaacagaaatatcccggtcataagtatccgcaactgcgtttctttatcggtgatgtccgtgacctcgaacgcctgacgcgggcttgcgaaggagtggacgtgattatccatgcagccgccatcaagcaggtggataccgctgaatacaatcccgaagagtgcatcaaaaccaatgtacacggtgcgcagaatgtgataaaggctgctcttgccaccggtgtacagcatgtggtggccctttctactgacaaggcttgtgcccccattaatctttatggcgccaccaagctcacttccgacaagctgtttactgccgccaacaatatcagcggttccaaggacatcaggttctccgtagtccgttatggcaatgtgatgggttcccgcggttccgtaatccctttctttatcaacaagcgtgacaacggggcgaaggaacttcccataaccgatatgcgcatgacccgtttcaacatttcactggaagccggtgtcgctttggtcatgtatgccatcggacatcacctgggtggtgaaatctttattcctaagattccttcctatcatatccaggacgtggctaccgccattgcacccaatctgccgcaggtggaagtgggcatccgtccgggagagaaactgcacgaggagatgattactgtaaccgatgctcttgatacaatcgatttgggcagatattatgtcattcttccttccgtatctttcaagcacagtcgcgaagagttcatcagacatcacaatgcagtacccgttcccgacggtttccactacagcagtgacaacaatacggagtgggagacagtagagactatgcgcgagaatataaagaaatacgttgaccctaatttcgaggtgaaatgataagcaagcctattccatacggtcgtcagcatatcacagatgaggacatccgggcagtcatcgataccctgaaaagcgattacctgacacaaggtcccaaaatcagggaatttgaaacgaaatttgccgaatatgtaggtgcacaatatgccgtagcggtgaacaatgctacttcggggcttcatcttgcagctaccgcactgaatgtaaagccgggtgacaaggtgattgtcactcccatgacctttgctgccagtgccaactgcattcgctattgtggcggcgaggtggtattctgtgatattgacaaggatacttacctcatggatatccgtaaactcgaagccatgcttaaagcttctcctcgcggtacttacaaaggtattgttccggttgattttgcaggctatcctttggatctggaagagttcagaaagcttgccgacgagtacggcttgtggattatcgaggatgcctgtcatgctcccggtggctatttcatgaacagtaaaggcaagaaacaacattgtggcaacggttgttttgccgactgtgccgtattctctttccatcccgtgaaacatatcgctacgggtgagggaggcatggtgaccaccaacagcaaggagctctatgacaagctttgtctttaccgtacgcatggcattacgaaagaccctgctttattgcacgagcatcatggtggctggtattacgagatgcaggagttaggctacaattaccgtctgactgattttcaggctgccttgggtatttctcagctggagcgtgcgaaagcaggtcttgaccgccgccatgaaatcgtgagacgctataatgaagcgttttccggaatagatggtatcaagactccgttcaatgctgccgatgtctatcatgcttatcacctttatatcattcaagtagctgaccgcttgggcctttataattatctgcacgagaacaatgtctatgcgcaggttcattatgctccgcttcatctgatgccttactatcagcagtggggaaataggaaaggcgatttacctatagtagaagagtattacgaacattgtctgagtcttccgatgtatcccacgctgacggacgaggaacaggagtatgtgattaaaaaggttatagaatttgtagcgaaatgaattgcgtaaacaagcttgttctcggtaccgtacagttcggacttgactatggaataaataatcagtttgggcaggtacaccaagatgaggtcgggcagatattgaggtgggcaaagaaaagcggaattaatacgtttgatacctcctctgcctatggaagtagtgagagcgttttaggaaggtctctttctgaaaataatcttcagtttcagattatttccaaatatccccagtctaaagaaaatgttgctaccgtattcgcttcttctatagagaagctccatcaacagaagttatatggttatcttgttcatcattttgagttctatcaatcccatcctcaattatgggaagagatgaagcaactcaaagcagagggaaaagtagaaaaaattggtttttcgctttatgatatcaatcaactgcaatatttgttagataatagagtagagtttgatattttacaatttccttataatctcttcgatcggcagttcgatgtttatctttctcaacttaagcagtctggggtagagatacatactcgttctgtatttttgcagggacttttttttaaggatctgggtagccttagtgggcagatggaaccattgaaaccttatttattgcagattagattctattgtgcagtgcattctatcaccattgaacaatgtgcattaagttttgtgcttcgaaacccctttattgatggtgtattgataggggttgataatataagtcagttgcagaacaatatcaatgtggccatctgtacgaaagaggttgaggagttggctaaacagataactgtgaaagaaacttatttgttgaatccttctaattggttataatatgaatgttttagactttttctctttggagaataaagtagccattgtcactggcggctacggttatttgggaaaagcttttgtacagtctcttaatgaagcaggggcaaaagttgttgtggccggtagagatgaacaaaagtttaaattggcttttcccattgtttccaatatctatttctgccctttggatatttcgaacacagagagcatcaaaaaatgctttgctgatgtgaataaaacatatggtagtattgatattttggtgaataatgcagtatatctgtccggtcaatatcctgaagaagttagtgacaaggatttggcttattcatttgatggtattataggtagtgtttacaagtgtatacgcgaagtaattccttatatgagagaacaaaagtctggaaatattgtgaacatcgcttctatgtacggtgtggtggttcctgactttaaggtttacgacggtgattgcaacccaaattttaatcctcctcaatacggagcctccaaagccggagtcattcaactgaccaaattctttggtgaatatctaataggtgataatattcgtgtaaatgccatttctccaggaccttttccttcgccttctgtacaaaagaatgaagagtttgtaagtcgtttggcaggtaaaaatccttcccggcgcattggcaatcctgaggatttaaaaggtgcattgctttttttggcatcagatgcatccaaatatgtagtgggacagaatattcaagtagatggagggtggacaatatggtgaatacactttgtattgtgcaagcgcgtttgacttcatcaagactgccagagaaggtattgatggagttgggaaacagtgggctttcaattctcgaacatgttaatatgcgtctcaataagtccttgaaaatagataaggttgtatttgctataccagacacacctttgaatgataaactggccgattttttggaaaataagaagatagaatattgtcgaggtagtgaaaatgatgttttagggcgcttctatcattgtgcagagaaatataaccctgaattgattgtcagggccacttgcgataatccgtgtgttgattggcatttggctgatgaaatgatagaaaactggggtgatgcggattatatgtattgtaaagaaactccattgggtacttctgtagaggtatttacaaagcatgctttaaatgaagcttatcaccatgctaaaacccctgaagaaagagagcatgtttgcccttacatagctcgtaatgaaaaaaatatttgcaaacaatatccttataataagcttagttatcgtttgactgttgatgaggaagccgattttttgctgatgaatgaaatctataagcagctttacaagaatgctcctattgagaataagatgatttatgaatacttggagaaacatcaagaactattggggattaatagtaaggtaaaacaaaagtttctctga

SEQ ID NO: 96 - DNA, 19267 bp, unidentified
  source 1..19267: mol_type = unassigned DNA
atgaaaaaaggaaataaatacggaacgcatagagtaatttcaccgaaaggagtattgccacaaccagctgataaactggataacaatatggacgaaatctatgataacgagattttgatcgatgtgcaaactctgaatatcgattcggctagttttactcagattgaagaacaagccggaggggataaagctaaaattgccgggatcatgctgggaattgtagagaaacaaggaaaacaccgtaatccggtgaccggttccggtggtatgttactgggaacggtggaaaaaatcggagatgctttagttggaaagaccgatctgaaagtgggagataaaatcgcaactttggtgtctttgtcgctgactccgcttcgtatcgataaaattaaagaaatccgggcagatgtcgaccaggtagatatcgatggtaaagctattttgtttgaaagcggtatttatgcgaaaattccgtcagatctgccggaaaagttggctttgtcggctctcgatgtagccggagctccggctcagactgctaaattggtgaaaccgggagatacggtattgattatcggtgccggtggtaaatcgggtatgttgtgttgctatgaagcaaagaaacgtgctggtgttaccggtaaagtaatcggtttgtgccatagccagagaagtaccgaacggcttcagaaattaggcttctgtgattatgtattctcggccgatgcaactcagccggttccggttatggagaaaattgccgaactgacgaatggtgaaatgtgtgatattacgatcaataatgtgaatattacggatactgagatgaccagcatcttgtgtactaaaaatgacggattggtctatttcttctctatggcgaccagttttacgaaggctgctttgggagcggaaggtgtcggcagcgatgtgactatgatcgttggaaatgggtataccaaaggacatgctgagattacactgcaggaacttcgtgaaagcgaggcattacggaagatatttacagagttgtatgcctgaatggtcgggattttataatcccgacgaattaaaaatatgtttttatggctagcagaagaaaagagtttttccctgaagtgaccgatgaacaatggaacgattggcattggcaggtgaagaacaggattgaaactttggatcagctgaagaaatacatccggctgacaccagatgaggaagagggtatccgtgagtcgctgaagacattacggatggcgatcacaccttattatctgagtctgatcgatcccgataatccttattgtccgatccgtaaacaatcggtgccgaccattgaagaattgcatcggtcaccggctgatctggaagatcccttgcatgaagacggtgattcacccgtaccgggactgacccaccgttatcctgaccgggtgttgttcctgatcaccgatatgtgttcgatgtattgccggcattgtacccggcgccgctttgccggacatcacgattgtgccactccattggaaagaatcgataaatgtatcgaatatatcgctaataccccccaggtgagagatgtcctcctatcgggaggggatgccttattggtcagtgacgaacgattggaatatatcatcaaacggctgcgtggaatccctcatgtcgagattatccgtatcgggtcgagaacaccggtggtgttaccccagcgcattacgccggaattggtaaatatgcttcggaaatatcatccgatttggctgaatactcatttcaaccatccgaacgaaattaccgaagagtcggcggctgcttgtgcccggctggccgatgcgggtatacctttgggaaatcagtctgtcctgctccgcgggatcaacgattgtacacatgtcatgaaaaaattggtgcacgagttggtcaagatccgggtacgtccctattacatctatatctgtgatctttctgtgggtatcggtcatttccgtacccctgtatcgaagggaatcgagattatcgagaacctgcggggacatacttccggttatgccgtgcctactttcgtcgtggatgctcccggtggaggcggaaaaattccggtgatgccgacctatctgatttctcagggccccaatcgggtggtgttgcgtaattttgaaggcgtggtgactacgtataccgaaccgacggattacagagacgaatgccactgtgaagagtgtgagaagcgccgtaaaacagaaggagtggctgagttgctgagcggagaacgcttgtctctcgaaccggcgaatctggatcgtaagacacgtaatctattggcgaaaggataaattatttgtgattttggatttaccgtttcattcgattgaaaggataaatccggaatcataaatgaaaatgctgaacagatgggttttgttgatgacatatccgattacaggagtctggcaattgtcggattggagaaaaatacagggaaaacagaatgcctgaattacatccttcgcaggataaaagattcggcagatcggttcgctctgacttcgatcggaattgacggagaaaaccgggatcaggtatgtcaaaccccgaaacccgagattatcgtgccggaaggaatgatattcgttacttcggagaaacattaccgggagaggaggttggtggctgaaatcatggaaatcgatgatcatcggactgctttgggacggttggttatcgccagggctaaaacttcgggaaaagtattgctttcagggcctgcggatactgccgggttgaaaagtctgatccggcatatgaaagatttcggggtacgaacgaccttggtcgacggggctttgtcccgtttaagcctggcgtctcccaccgttacggaggcgatggtcttagcgacgggggctgctgtttccgggaatattcgggaattggtgagacgtacccgttatgtttgtgatttgatcgatctggaagaggtggacgaagttttacaagagaggttggatgccattcaacaaggtgtatgggcggtcgggccggagggagaatgtatcgatctgaaattgccttctgtgtttatgctggagaaaagtggaaccgatctgctgcaatatgggcatcggatctttattgccggtgctgtgagtgataaagtatttcagtttttacgcgtacagaaacagaccgtagaattgatcgtccgtgattttacccgtgtttttgccgcacctgagtctttttatgcctttttacgtaagggcggaagagtacaggtgcttcatcgtagccggcttttggccgttacgatcaatcctcagtctccgggaggattacttttggattcgttgcgtttgcagcaagcattggaagaaagcttgcaaattccggtgtatgatgtgaaaaaaatagaaaaagtcggtaaaaaccgttgaggatatgattttaagggaagcgataagacaagtcaggggattccgttatatgatcgaacaattggatatctgttcggctgtaggccggagggtattgtatgatctgccctggctcgattcgaaatctcggttggaggccgaatttgaacgtattcaaaagatcatggtactttttgaacaacctgaaaatgaatcccggctggaacgtttgactggtaagctgatgcaggtgagagatatccgggggacgatcgggcggatggcgatggagcaagtgttggatgatcttgaattgttcgaattgaaaacttttgctttgtgctcggaagaaatcagggaacttgtcgaagaatggcggattgttttactcccggaactggagccggttgcacgtttgttggatccggaagggaatcggattcctcatttttatatttatgatacttattcggctgagctggccaggctgagagctgaaataaaacaaaagagccttcaaggggcagaagaacgggaattagaagcgttgtatgtacaaagtgtggttttggaagacaaggtacgcgaagagttgtctgtgcagttgagaccttatcacgacgatttgaaacaggctttggaagcggtcggattgctggatgtcgtattggcaaaagccagacaagcaataagaggacaattgactttgccgcaaattccggaagagggggaaatggtgttcgaaggtcttttccatcctcagatccgggagattttagaacaggaaggaagagcgtttcaggctgtagatttgaaattggaaaagggaacgacggtgattaccggagccaatatggccggaaagacagtgttgttgaaaagtgtgcaattggcgcaatacctgatgcagttcggtttttatgtacctgcccggcgggcgggtatgccgctcgtggaacaagtcttgaccagtatcggggatgatcaggatgaattgaacggtctctcttcttatgcggctgagatgttgcgggtggatgaaatgatccggcaagtcaggcagcgaagtaaaattttggtgctgatagacgaattggcccggacgaccaatcccgtcgagggacgggcaattgtgaatggggtagtggattttttgactactcaccgggtgatggctatggttactacccattatagcggaataacggccgaatgccgtaaattgagagtgcggggatttgtagagaatcgggttgaagggaatatgaccctgaaaaatatcaatgagtttatcgattattcactcgaagaagacagcggagaagaagttccccaggaggcgatgcgtattgcctggatgctggggatcgaccgtggagtgttggaacgggtggaaaattatttgcaggaagaaaatcctgattggaaaaagacagtacagtagaaagaaaatatatatgaaaagtaaattaggaatagattttgataaagtcggacatgcccgtgaaatggcccgtaagattgctgaccaggtgcaggattttgtggatggctatacgacagtggctgtcgaaaggacattgtgtcgtttgcttggtatcgacggagtggatgttcatgctgtccctctgccgaacattttggtagacgagctgaaagaaaagaacgtgttgggagaaggaattttattctttctgggtaatgtaatggtggaaaccggaatgactccgcaggaaatagccgaacaagtggctgccgggaaagtagatgtcacccgggtaccggtatgtactcccggccagcgggaaaaagcgttgcaaccctatatcgaggccagtatccgtcggatttccgacaaccggaaacggcgtgagaattatatcgcaacgatcggagagggagcaaagccttatctttatgtcattgtcgctaccggtaatatttacgaagacgtggtacaggcacaggcggctgcccggcaaggggcggatgtcattgctgtgatccgtacaacggggcaaagtttgttggactatgtaccctatggggctacgacagaaggattcggcggaacttttgccacccaggaaaattttcggattatgcggaaagctttggatgaggtaggagaagaagtcggtcgttatattcggctgtgtaattattgttccggtttatgtatgccggagattgctgtgatgggagctttggaagggctggatgtgatgttgaacgatgcgttgtatgggattttattccgggatatcaatatgcagcggacgttggtcgaccagtttatgtcgcgggtgatcaacggctttgccggagtgataatcaacacaggcgaagataactacctgactactgccgacgctgtcgaagaagcacatactgttttggcttccgatctgatcaatgaacaattggctttattggccgggctgccggaagaacaaatgggcctgggacatgcttttgaaatggatcccatgctggaaaacggctttttgtacgaattggctcaggcccagatgacccgggaaatttttccgaaggctactttgaaatatatgcctccgacgaaatttatgaccggaaatattttccgcggacatattcaggatgctcttttcaatatgatcggaatctggacttcacaaggtattcaactgttgggaatgccgaccgaagccatacatactccatttatgtcggatcgttatctgtcgatcgagaatgcccgttatatttttaataatatgaaaaatatcggagatgaagtggtctttaaagaaaacgggattatacaaaacagggcgaaagaagtgttggataaagctaccgttctcttggaaaagattgaacgggaaggactttttacagccttggaaaaaggaatttttgccgatatcaagcgtcccaaaaacggaggaaaaggcttggacggcgtttgtgccaagggaaagaactatagcaatccttttgtagagattatgatgaacagataacaaaaatcgtaaatcaaataaagattatgagcggaggtttatattcaacagaagggagagatttcgatcaaacccttgatctgaaaaagataaaaccctacggggatacgatgaacgacggaaagacacagctgagtttcactttacctgtacctgccggagatgaagcgatagaggctgctaaacagttgatgaaaaaaatgggatttgaaaatcctcaggtggtgtttcatcaggaactgacgaaaggatatactttttttaattgttatggaaattgtgtacacacggtagattatagccatatctatgtgccgaaagtggaatcgaccaagtgggatatgggagagaccgatcagtttgtccgggaacatatcggtcggaaaattgtggtgatcggagctagtaccggaacagatgcccatacggtgggaatcgacgctattatgaatatgaaaggttttgccggacattatggtttggagcggtatgaaatgttcgaagccttgaatatgggtagccaggtgaccaacgaggaatttatcgctaaggctatcgagttgaaagccgatgctttattggtttcgcagaccgtgactcagaaagatattcatattaaaaatctgacggaactcgtggagatgttagaagccgaaggattacgggacaaagtgatcctggcttgtggtggtccccggatttcacatgagttggcgaaagaattggggtacgatgccggcttcgggatgaatacctatgccgacgatgtcgcctcgtttattgcgcaggaattggatcgaagaatgaatcattgaaaatatacaagctatggaaaaagaacaaatcagggaagtgattgccaggagagtggcaatggaactccacgatggagacgtggtgaatctgggtatcggtttgccgactttagtgccgaattatctgcctgaaggtgtcgaggtcattttacaaacggagaatggattgatcggtatggggccgactcctgctccgggagaagaagatccggacttgatcaatgccggcggtggagcgataacggctctgcccggagcggccagcttcgatagtgctacttcgttcggtattatccggggcggacacgtagatgtcagtatcctgggggccttgcaagtagatgagaaaggagatttagccaactggatgataccggggaaaaaaacaccgggaatgggtggagcgatggacctgctgatgggagccggtaaggtgatcctggccatggaacatacggcaaaaggaaatccgaaaatcctgaaaaaatgtactttacctttgacagccaaggggcaggtgaatatgatcgttacagaaatgggagttatggagatcacacccgggggaattgtactgaaagagatacatcctgagtttacggtagaacaggtgcaggcagctacagaagcaactctgatcgttgccccggatttaaaaaagatgtgctgaacgacgaaagcgtattgaaggaaatcacgatggaggatggatggtggatacctctagcccgaatcgtaaactataaattaaaaaaggtatggatttttcattatcaaaaaaagagatattgtttcagcagatgatcagagcatttgctgagaaagaagtaaaaccgctggcggcagaagtggacgaagaagagagattccctgtcgaaacggtagaaaaaatggcgaaacaggggattatgggtatccctttcccggtggaatatggcggagccggtggtgataacgtattgtattctatggctgtagaggaattgtcccgggtatgtgcaacgaccggggttattgtttctgcccatacctctttgtgtgcttctccgatctatgaattcggaaatgaagaacaacggaaaaaatatttacccaaattatgttcgggagaatggatcggagcttttggtctgaccgaaccgaatgcaggtaccgatgcctctgcccagcagacgatggctgttgctgaagaggatcattatgtgctcaacgggtccaaaatatttattacgaatgcagcttatgcacacgtttacattgttatggcgatgaccgataagtcgcagggtacacgaggaatctctgcttttatcgttgaacgggattttccgggattttccatcggtaaaaaagagaaaaagatggggatccggggatccgcaacctgtgagttgatttttgaaaattgtattgtgcctaaaggaaatatgctgggtaaaccgggtgaaggatttaaaattgcgatgaagacgctcgatggcggacgtatgggaattgcttcacaggccttgggaattgctcagggagccatggatgagacaataaaatatgtgaaagaacggaaacagttcggacgctctatcggacaatttcagaatacccaatttcagttggccgatttaaatgccaagatcgaagctgcccgtttgttggtgcggacggctgcctggaagaaagacaggaaaatcccttactctgtcgattcggcacgggctaagttatttgctgctgaaacagcgatggaagtgacgacaaaagccgtacagttccacggagggtatggatatacccgtgagtatccggtcgaacggatgatgagagatgccaagattacggagatttatgagggaacctctgaagtacagcggatggtgattgctgctgctctattgaaataataatgttttccgcattgaacttataaaaagagaatacatgaaaatagtagtttgtataaaacaagtacctgatacgacagagatcaaactcgatccggtaacaggaacaatgatacgggatggtgtacctagcattatgaatcccgacgataaaggaggattggaaatggctttggccttgaaagataaatatggtgcgcaggtaaccgttattacgatgggaccgcctcaggccgacgatattttgcgtgaagcttttgccatgggagccgaccgggcgattcatttgagcgaccgtaagtttgccggtgcagatacattggctacgtcgaatgctattgccggtgctttacggatgctggatttcgacctggtcattaccggccggcaggcgatcgatggagatacggcgcaggtaggacctcagattgccgagcatctcgatttgccacaagtgacgtatgtcgagaatttggaattcgatggtgacaagttgtttacgatccgtaaatctaccgaagaaggatatcaaaccgtacaggtggaatctccctgtgtccttactgttctggctacggcaaacaaagcgcgctatatgtctgtgcggggaatcgtagaggcatacgatcgggaagtggaaatctggaattttaataatatcagtgtggatgaagctaaattgggattgaacggttcgccgacgcgggtatggaagtcttttaccaaaggagctaaagcagccggaaaagttttcgaagtggaaccggccgaagctgtagatgttattatcgaaaaattgaaagagaaatttattatttaatacatgattttagaggaaaaccgggaataatccggtgaaatctaaagtttaaaatctgatgaagatggataaatctcaatataaagacgtttatgtattcgtagagcaacgggaaggagttattcagaaagttgccatcgaattattggggaaagcccgggagttggccgatagcctgaatgaaaaagtggtagcgatgttgttgggttatgaagtggcgggtcaggcacaggaattgatcgcttatggggccgatgtcgtattgtgtgctgacgaacgggagctggtacaatataataccgagccttacgctcaggcgattacacagattgtacatgagcgtaaacccagtatcgtactgattggagcgacgacgatcggccgggatttgggccctcgtttatccgcccgtttagagaccgggttgacagccgattgtacgggcctcgctatctcggatgaacgggatttgctgatgacccgtcctgcattcggaggaaatctgatggcgacgattatttgtaaagaacaccggccgcaaatgtcgaccgtacgtccgggagtgatgcgcacgaaaccgaaagatgaacaacgtgccggaacggtagagaaggtgaatattcatttcgataagtcgaaatttaaagtgcggattctcgagacggtgaaagaacaaaagaaccgtatcgatataacagaagcgaagattctcgtatccggaggccgtggtgtaggtaatacggagggatttgagatgctcggaaaattagcggaaacgctgaatgccgaggtttcttcttcacgtgccatggtggatgccggggttatgcctcatgaccgtcaggttggccaaaccgggaaaaccgttcgtcccgatctgtatttcgctatgggtatttccggagctattcagcatttggccggaatggaggaatcggaatttatcgttgccgtgaacaaggataaatatgctccgatttttaacgttgccgacctgggaattgtcggggatgtgaaacaggtcgttccgttgctgaccgagaggttgacaaacatccggaaaactgacaaataaaagcccggacatggagtatcaaaaattaatgctggaaaaacaagatcgtgtttgtctggtaaagatcaatcatccggaggcattgaatgccttgaatacggtgatcttgcaggaattggaccgggcattcgatgaaattgcagccgatccggaaaccgatgtggttattctgacaggcgaaggacgttcgtttgttgcgggagccgatattgctgaaatgagtgtgatgaaggccgaagaaggccggcgtttcggtgagttaggggctgctgttttccggaaaatcgaactgatggctaagccggttattgctgccgtgaatggatttgctttaggaggaggatgtgaactggcgatggcttgtgatatccgtatcgcctcggctaaggcgaagttcggtcagccggaagtgggacttgggatcacgccgggattttccggtacccagcgtttaccgcgtttagtcggattaggtaaagccaaagagttgatttatacggctgcggttatccatgccgaggaagcttgccggatcggactggtgaacaaagtggtggaaccggaagaattgatgaatgagtgtatggctatggcaaagactattgctgctaaagcgccattggcggtccgttatgccaaagaagccatcaaccggggagtggaaacggatatggataccggtatcgtcatcgaaaacggtttgttcgggttgtgtttcgcaacgaccgaccagaaggaaggcatggaagcttttttatggaaacgtaaacccgaatttaaagggaattaaaatctttgtaatttaaatttatcgattatgaaaatatgcattgttggaacagggactatgggacatggtattgcccaggtatttgcccaggccggacatgaggtattgttaaaaggccgttctgaagcttctttggcaaaagctcacaaagctatggataaaaatctttccagaatggtggaaaaaggtaaattggaagccggggttaaagatcaggtattggccaggattaaagatacgatgaaatatgaggattgtgccgatgctgatttggtgatcgaggcgatagctgaagatatggctaccaagcatgagatattcaaattgttggacggaatttgtaaaccggaagcgatattggcaaccaatacttcttcgctttctataacggaagtggccgctgtgactaaccgtccggaaaaggtgatcggtatgcatttcttcaatcctgttccggctatgaaactggtggaagtgatcaaaggccggctgacttcggcagaggtgcatgatcaggtatttgctttatcgcaggaaatcgggaaagtgcccgtcagtgtcgaggaagctcctggatttatagtcaaccggattctgatccctctggtgaacgaaggcatcggtatattagctgacggagtggcgaaaaaagaggaaatcgatgccgcgatgaaattaggggctaaccatcctatgggaccattggaactgggtgatttgatcggattggatgtttgtctggctattatggaagtgttgtaccgggaattcggtgactccaaataccggcctcatcctttgttgcggaaaatggttcgcgctaacttattgggacggaagaccggagtcgggttttatgactatcggaaataatgaggagagtcttctttaccgggatacgatgttggggaatatttccccaacatttttactttttccccactttctacaagctgcgattcttaatctgttgtgtgtaatgtattgataattagtgtattttgttgattttgtgcttgtggcatcggatttgttctgtttaaggataaaatctaactctaaaaaataatagtatgaaaaagatcgtcattttaggaatcggagcttctatgttcttcctgggtagttgcgtagagagttctcagaaatataagtctttacaagtccgtctggattctttgagtacagtacatattatgcagaattccgaaatggagagtatgctggccgatttgaacgatatttctgccggaatgcaatcgttgcgggatgccgaacgtttattgactatggaaacaattaatgaaaataaagccaatagtaaatccaaacagcaattgaatcagctgaaaaaagacgtacaggctattaccgaggcgatcgcttcttataaagaacagatttccaaactcgaaggtaagaataaaagccagtcggccgagtttaaaagattgattgccggcttaaatgcggaattggatcaacgtacacagaaactgaatgaaattactaaacaattggctgagaagaatcagcaattggcagtgaagaccgaggaagtcgctaatctgaccgagaatgtggaagctttggataaagccaataaaagtcagcaaatgacgatcaatgaacaggatatggcgattcatcagggacactatttgattggaaaccgcaaagagctgaaagaagctgaggtaatttccagacaagggattttctgtccgccgatcgtatcgtcacaagcacaaaaagccgactttaccgatttggatatccgtgagatgaaggtgatcccgttgaatagtaaaaaagcgaaattactttctgtccatccggctgattcctatactttggagaccggtgaagatggtaatatgactctgaaaatcaatgacgaaaataatttctggaaacaaacaaaatacttggttgtgatgattgaataaaagcgggaataattttaactgagagaggcatacccaaaaagtatgtctcttttcttttttttcacaacgattattcttgtcgggagagaaaataatgaaaaaaaactagccgaagatcatcaggatttttaaaagtgtatccgatgagaaaatcgctttcaatttgtcgatacttttgtatttcagtgttttaacactgcttactgagatgtttatttcctgtgctatttgctgattgtcgaggccttgaaaagcgagctgcatgacttgtttactacggggaggaagtttttctatttctgcgagaatctgcatggcgacgtctgcttctacaatgacattgaagatattgacctctttcagaggatggttgtttagatatttagcttgcagcttgcgggttcgcagccattcaagtgaaaggttatgaaccagcatatacatataattatcgatattctcaatatttttgttttttccttgtaattcccagaggcgtgcaaaagcttcctgtacaatatcttgggcagctgttttatcgcaaaggaaacggttggctgcgaaacacaaagaaacatacaaacggttcactaagctttcgaacttggttgcagctgtatttcccgtttgatatgttgtgtttttatccatttttataacatctttttaaggaattgctctacaaatttaaaaaaaattataattccgttcatccttttcgttactgagttagtctttaatatgaattaagagaggaaaaatgtagtaaaatagattcagatgaacagagagagtttaaatatattgttaaaaaaagcctattatcaacagctttctgaggaagagaggaaaactttgaagttgtggttgggggagtcgggagaaaatacagagatgtataaacggttgatgtcgggacagagcttgacggaatattcggattgggtgactggattcgacctttcccgggcgatggaagctatccggagtaaggtgaaacggaacaggcaaaggagaatccggaaatcagtaagttgggtggctgcctgtgtaatactctgtctgggcataactttcgttttttatttcacttcaatggattcagaacaggtattgacagaacaaatggctgctcagatacagcctggctcggcaaaggcgatattgactttaggggatggacggcaagtggctttggataaaaaacccattgaattgcttgtcaataaacaacaaatggtgacaggagatagtgcgaccttgaattattctattgtattgcccgcttctgagaccgaacagatacaacggcaggaagtggcagaatatcatacaatagaagttcctgccggaggagaatatcatctggttttggctgatggtacaaagatatggttgaatgcagaaagttctctggtatttccggttgaattttccgggaataagcgacaggttattttaaaaggagaagcttattttgaggtggcccggaatgaacatttaccttttgttgtgagtacagtctccggggtacaaatttgtgtattgggaacacagtttaatgtggaagcttatgatgaccgggaaagtgtaaagactactctggtggagggaagtgtagatgtacaggcagggggcgaaaaggtacgtttgattccccatgaacaattgcaatatcataaaaatactgctgaaatggaagtcagggaggtaaatgtacgggagattatcgcctggaaaaacggttggtttgtctttgataatactacattgggggaaattgtaaaaactttgcaacgttggtataacatagaagtagaatttatacgtcctgaattagaacatttgcgtttcaccggtgatttaagcaggtatgactcttttgatgctgttatccggatgtttgaagatactaaaaagctgaaaatgagtgtgatatcgaacaggctaattgtcgatagaaaataacgcagattaattttaaataaaaatacctaaagatgaggattgtgctacctttttctttcatctatttttataccgttaaaaacggacgtttttttgggaaaaatttaaatttataaacctactattttacttttctgtaaaaattaatccacagtttggaattttttctcgtatcgtgatattgtatttataatcaactaattacattcttgtaaaacactgtaaaattcttgccattacagaaaactgtgcttgacattctttggttttttactcttcatttttcactttttacgcttaaaaagtgacttaaaaaacgtcccaataaaagggtggctaactatatgtaattcagtgcttaatattaatcaaaaacagaaaagtatgagaaaaacatcctgttttaaacgtaggtttatgactaaggctttgattctatcgatagttttagtgatagtagggggaagttcttctatcgtaggagcttctcccagagttgataagcaactcggtcaattgataactttgaccatgaaggaaacttctgtaataaatattattcaggaaattcgtaaatcaacagattatcgttttttatttcaggtggacgatttaaaaaatatgaataaagaagaatttgttgtttctcatgcgaccataaaggaggtcatggataagttagttgatggtacaaatctgacatatacttttcgttctgatgctgtagtagttttagctttgaaacaacaagcggctcaaatcaaatcaactcagaaatttagcttgaaagggcgggtgtttgaaaaaacggatcctggtaaaggaattccttttgcttcggtttttctgcctcagttaggcataggcactgtaacaaaagcagacgggacatttgagataaaaaatctggatcctgatgtttataaggtggaaattagttctttaggttttgagacgttacagacaactattaatttgaatagtaaaactcctgcaaatttgaaatttggtttagtggaagcgaatttccgtttggatgaggtggtgataactgccactaatagtaaagccggagcttcgacttcttcttctatctcacgtttggcaatggatcatatgcaggcttccagtttgtctgatattatgcaactattaccgggagcaacggtaagtaaaccggatttaacttccgtatcgactttaagcctaaggggaggggcttctttaggaacagcggtgatcatggacggagctcctatttcaaacaattctaatatgcagatgatgacaacctctattggtggagctgtcccggcaacgagaggaacctctccccaaaccggaattgatttaagaacgattacaactgataacatcgagtccgtggaagtgattacgggagttccaagtgttgaatatggcgatttgacaggtggggctgtgattgtaaatacaaaagccggacgtcagcctttgcaaattaaattcaatacaaatcccaatgtttatatgttttccggtacaaaaggattggggttaggagaaaaaggaggaaatgtgaatgtcgggttagattatgcatatagcaacgcagatcctacagagggatatgattattatcaacgaattactgcacgtatgatgtattcgaatggtttttttcaagatcgtttacgttcaaatacttcattgaatgttatctatgctaaagataaaggggaacctaacccggatgatgaacaggacatgcggactaccagacaacgggatttagggctggttttcaatacaaatgggacattagatataaatgccggttggcttaaaaatattcgttatgcagcttctgtaaattatacgaacaggcattcttattttcaggatgaggcgactaatgcggattggggatattcccagtcaatgacagatggagctgtgttgtccaatgttcccggacgtccagtctatttggaagatggtacagaggttacccgggttccggtgggagaagaaagtttaaaggcgtggatgttacctggttcttatatttatatgtatgatgtttatggaaaagagctgaatacatttgccaaactgactacaaattttgccggcaagaccggacctattcatcatcggttgattttaggggctgattttagaaattcaggtaatctgggtaaaggaaagatatttgatccggaaaatcctccttaccggaatttatcttatgactttgcatctcaacgtaacagagcgtttaaggatattccttttatgaaccatctcggagtgtatgcagaggagaatatacagtggcttatggggaaacatgaattaaatatttctgctggaatacgttgggataaagtctgcggtttcggtgacggattttctccgcgtatcaatgcttctgtggatattatacccaggcatctgactctccggggagcctatggtattactttaaaagctccgactttgttatatatgtatccggataaggcttattttgatttagtgaattttaataatgcttcaaccagtgctcctgacggacaaaaatttcaggtcattaccacgcgtgtctttgatgcaggaaataagaatttagaaatggcaaagaacaaaaaatgtgagttggggttggatctgaaatttaataaaatgcgtttttttattactgcctatcaggaaaaatgtgataacggttataccattgccaaatcgttgaatacctttaaaagtgtaccttttgtacaatattctgaaattactccgcgtccttctgatgaaagccagatagctaatttgaaagagatagccaccaatccttatttattgagttataccactccgatgaatgcgcttaaatatctggtgcgggggattgatttcgatttcgattttggacgtgtggatgccattcgtacggcttttaatttgaacggttcgtatatgtggaggaaatccggttctaataattatatgttctggaataaaattacaggaacagattattctaaatatccccatatgggagttttttctccggattatgaaactgattatagcgaacgtttggctacaaatttgagggtcatccataatattcctcaaataggattggtggtaacattgactgctaatgtgatttggaaagatcgctcatggaaatcttatggtaatgactcaattcctataaaatatatttcccgtttagatggaaaattatatgactttaatccggatgatattgatagtgaggaatttatcgggatagaccggaggtcaactgttaatccgacccggttgatccgggaaggagttatgcctccgcttttaaccatgaatttgaatataactaaagaaatacgtgactttttgaaggtttctttctttgcaaataatatgttcaggagtactcctttatgggaaagcaagaaaaatccgggatcctatacccgaaggaatactacagagaacgtgttcttttttggtctggaattgacggctattattcgttaa

SEQ ID NO: 97 - DNA, 19002 bp, unidentified
  source 1..19002: mol_type = unassigned DNA
ttgggaaatcatgaaaagaaaaaaattttgtatccattatacgcactcattccagcactgatcgtatatactgttttttcggttattcctattttgatcagctttgttttttcttttacagattggaatatagagcgtttgtatgaacctacatttactggactaaaaaactatatagaattgttgaaagatccggtttttatacgttctattgccaatacttttatttttgtagcactgactacaatattaaaaacctctttgggattccttcttgcgcttgctcttgtgaaaaaggtatttgcacgtggttttcttcgaactgtatattatgctccttgcgtacttagtattacggttattggtgtattgtttaaatctattcttgcaaatcgaggactgctcaataatgctctggaacttgtcggtctgggacaggttgccacagattggcttggaagatacgggacagcacttggaagtgtaatacttgttgaaacatggatgtgggcaggatttaatatgtttatctttatatcaggtcttcaggcaattcctgcagattattatgaaagcgcaacactagatggtgcatcggcatttgaaaaatttaaacatatcacattgcctttgattgttccgtcacttactgtcgttgtcacacttagtatagccggaggattgaaagtatttgatatcatctatgttattacgaatggaggtccgggattcgatacgcaggtactctctacatatacttagcagtcgtttagtcttggattcctgagagaatcaacagcaggatctatgattcttgctgtaatcgtatcatttactatgaacagatattttacaaagaaggaggttgaaatgtaatgaaaaaatggaccaaaggtgaaattatattgtccgatttattaattgcacttgctttcgtatatattgttccgtttcttatgatgattttaggttcgtttaaagctcagtcacaagcggcaatgtttaatctggaacttcctaaacagtggctcatttcgaactatgcacatgtactggaatcaggaaaaattcttcgcggatatttgaatagtgcaattatcacaattcctgtaacagtgttatcagtactttttggtgcagttgcaggtgtcgtgatatctagaagaaatgacagagtaacaagaggattgtattattattttatttttggacttacactcacccttcagattgcttctatatttttcttacttaaagtattaaatatatatggtacgtttttctctgtaatatgtatttttatttctctcagaattccgtttacagtaatgacattctacagttttgtaaaaggagtcccaagagatattgatgaagcagctattattgacggatgtaatttctggcagatgatgtttcacgtgctccttccagtacttaaacctattgtggttaccaatattgttattacagctattgatgtgtggaacaattttatgatatcattattttatctgggatcttcagaaaaagccaccgtggcaatggcaatctatagtttttttggaaggtacaacagagactggcagtatgtgtttggggcactgacactggctgttcttcctatgttgattctgtttatcattcttcaaaaacaaatagtggcaggaatgacatcaggagcagtgaaaggttaagctttagataggataggctctcggaatcatgagccttccgactaagattcattggtcggatgaaccttgaaaagtaaatattatccggaacggacatgaaaagtaataaatgatgaaaagtggcgcacttttatagaccttgcgtcaaacatggcttacaatggtattgcttatgaaattaagcggtttgctcaaagaaattttttagttgggaagtctttggcaaagtccatgcatcaagatgctgacacatcatgatggcgaacaggcggcagtacaacatcatagatgaacggtatctgccgtcttctaatttatagtctatcttttctcgtttgttacaacgttctgcagatgttcttgcgttgtattccagcttccattcctcgctgccacgaggcggagtattgaagagtcttgggttatcctttaatacaaggtgaacatttcttccatactttgcatcagaacagagttcatcgcaagtgcaatgaggtgtaccgcctttgtaagaaatcttaggacaacgatatttgatgcgtccttttcttggctcagcggcggcttgcttcataggaaagcccttaggacataaaggaatcccagccgatatcacagtcaggcggatttttttcaaactgccggaatagatcatcaacggtaagtttttcgacagaaggagctttttcttcttttcctttcggtttctgaggcttttccttaggtggatgaactgcgttagtcaggttcttgtcagaagataaccagagccgcctatgaaagtcataaaaggcaccaatgccaggagtatcatcaacataaaagccggaaataatggcatgaaggtgattctctttcaaatcagaagctaactttgtgtaggaagttattttaaatgcaacagaaacaaggatagagcgaagcatgtcagaaggaagtcttggttcagaaccaaagacagaataccggtcttgcataagtacatcaacttgtgacagatcaagattccaaaacttatcaaggatctgccaggtagaaaaagacagggaagttgcagcattcggataatatttacgaagttgagtcaggacacgatcctgataggcggaatgaccgccgatgttaataggtttcaatgaaacacacctccaaatcaaaaagtctgttccagctgagccggaacgatatgccttattgatcaagaggcgcgaagcgccgcatttttaggggcaaatgtcaagaactttttgaaaaaaaaggtggagaaaaaatgaaaatggaatctcagaagccgcagaaatacaggcttagagattccgagagactattaggttataagggagaaagaaaagatgaaaacaagatttattataataggttttggatggagagcagattttttttatcgcatagcaaaaatgatgcctgagcggttcgagataagtgcaggtgtattaagaacaaaacagcgtgcagaagaagtagcagagaaagaaggtgtgtatgctaccgaaaatttggatgaagctttgaaaacaaatccagattttgcagtattatgtgtaccgcgcacaatcgtaaaggaatatcttgtcaggctgatggaagcggggcttccaattttatgcgaaacacctccggcacaaaatgtaaaagaactttgtgaattatgggaggaaaccaaaagactaaaaggaagagttcagatcattgaacaatattttctgcagccgtattatgcagcaagcctggagattatccggaaaggatttcttggtgaaacgactggagttatgctgtcagcccttcatgggtatcatgctgtcagcatgtttcggaaatatcttgggattgggtttgaaaactgcagaatccgtggtcagaaatttatatctgatattacggcaaccaatggaagggaaggatttgatcaaagcgggaaaaaagtccagtttgaaagagattgggcttctattgcatttgacaacggaaaaacagcttttctggattttgccggcgaacaatatttctccatgattcgtgcaagacgctggaatattcagggtgtaaagggcgaaatcaatgatatgacagtcagatatttaacggaagagaaccttcctgttgtgcaggaaatatcaagatttgacgttggagtaaataataacagcgaatgggcacatcgtggcattatgtttttggatcagtatctttacacgaatcctttttatccagcgagaatgaatgatgatgaaattgctgtcgcatcctgtcttgaaaagatgaaagtatatgtagaaacgggcaaggacttttactctcttaaagaggctgcacaggatacttatttatcatttatgattgaaaaagcgattgggtcgggagaagaaatcgttacggaaaaacagccatgggcttataatagttaaaagaaaggaaaaggattgcagaaatataagtttcaaagacagatcatattaaattttgaccattcaatgctacagacaattttgggaagtgcatccattttaggaagtaaggatatattagaagacttcttttctttaaaaaaggaggggaatgttaatccgtattgggtaatttggagatggaaacaaacattattataaattatattttacatagatattaatgtattaaattacaaaatggtcggaatcaagcctccaagtcctcaactggaggcacataatctgatttatcgaagccgtcagggattaggaaatttatgaaaatttgacaagtctatccattcatgtatataatacagaagatgtaaatatcagaagaaaacaaatatcctaagaaaggagagcagactatgcgctggaaaacaacgaatcttcacctgcaaaaaggcaacaaattagctgtttacagggatagtgcgctctttttcaggtaaacagtttctaaaattaagaatgtaaatacgaaaagacactatctcctgttcaaaaatattggaaagatattattttgaaaaggagatttttttatgcgtaattttaatataaaaagacagatcaataaattgtatacacttactacggtaagctattttcggattgcgggagcatcgtgggtggcgcttcttgcactcagaggattttcactgttacagattggaatactggagagtattttccatatcgcaagcagttgttttgagatcccgtcaggtgttgtggcagatgtttttggaaggaaaaggacgctggctctttcgaagctggtcagtgtgctgtcttgtctggctatgattttatctgacaattttggaacggtggcatttgcgattgcattcagtgcgctcagttacaatctggaatcgggaaccatagaagctttggcgtatgacagtttaaagtcggtaaggcaggagaaaaaatataaccgatatgcttccacggaaatgatgttatatcggatcacaagttctacagcaacactttgtgcaggggttgcattgtggcttggatataaaaaagcatatgcgattgatattttctttgggatgatcgcacttggaatcgtatgcagtttaagagaaatatcgggatttacaggtactgatggtgaaccgaccaatccacagacagatgatcataaacaaaagcagatgagtgaagaaaagcaggaacggatgaatgaagaggaaactgatcagaaaaacattcagaacatccgcatttcagagagatttcaaaacgttgtcacagagagctggcatttcatgaaaaacaatcgaaaagccagaagtgttatgatcgtaaatgcattgatcggtgcagtgtcaacacttgtcctgtttttcctgcaggcaaagctgccactggcgggattgaacgaggcactgcttggcccggctctttttgtcatgggacttggagctgcactcggcgccaaagtggtgggatattttccaaattggaaatacaaaaagtatgttattttaagtggaatcggtgtgttgtctgcatttggaatgacgttttcgggcaatccatatctgatgattcttggtggctttgttggttcttttgcagatgattttctggaagtgcgcacagacatcctgttaaatgatatgattccatcggagcagagagctacgcttatttcggtaaattcttttacattttcgttggtgatgatcgtgatgtccacgttgatgggaagtattatgtagtatattttacagggcttgcgcgcttgcggattttctgtggggtggaagccctgttttttaaaaaaatttttacattgattctatggtaggcagcaactaaaaagtgtgcccaaaatataattgacataggatcagtaatgtttttcatgcatcaatgttaattaggtgtgcaaatgacggaaaaatgcatctgcatgaaaaaagaaatgggtaactttctcagctaaaagcttaccagacaaaaaacccatttcttattttaatatagcatttatgtttttataatacaagactgcaaattaattagcattacttctataatgtacgttatcaatatggaaaagaggaatggaaatgataaaagggtattcgcacaagcctatgggaactgttgcattaggaactcacttgggtaatttttcaaaagaagattctttgaaatatgtagaagcaataaagtatgcagttcgaaatgggatatactctattgatggagctataaattatagaggaatgtgttcagaacgagatgaaggagttgcattagctgaattaatgaattatggcattattaccagagaagaggtatttatatcatctaaggcaggattattatatggagatatttcagcaaagcttccaccaatgaaatacttgtcggaaaaactggaaaataaaggaatatcaatagaagatttttcagaatatgaaggtttattccagactctcaatcctgctttttatgaaatagctcttaataagtcattggaaaatttaggtcttgaaatgatagatgtttattacattcatattcccgagataacaaaattaaagttaacggaagacgaattctatgagaaaatggaaatgcttataagatggtatgagacaaagtgttttgaaggaaagattagatattatggcatagcatttgaatttatggtagaagaacctttcgaaaataagtggcatattgagattgaaagaataaagaatatagcaagaaaagtgtccggagaaaagaatcattttaaatacattttgtttgaatataatatcatgtgtgattgggctgacacagtgaactctcagatgatagatggtgtgaagatgacgatgatagaagcttgcaaggcattggaattagagactgttgccagcatgccatttgctatgggagacggatttaagaaatatgcacttagtgacatgttggattttgtgttgaaaaagatgaatcacgttattgttggaagcaagaatccgaaacatatcgaggagatactgaggtgttggagaggcaactttagtgaatgctctggtagacaaaggtttagtggaacgtgagggttcggctagaaaaggttactggaagataaaagaataagaagctttaaagaaaattgaagaactgaagaatgagaacacagcactccacgaagaactcgaatattacaaaaaccgtaaattaagcggacgacagaagcataatgcgaagtggatgggaatctataatgattttgttgccggatatgagaccagagtggtacggatctggtcgagattgcaaagtgcaacaatgtcagcaagcgtaccatttacagatacaaagcgtattatgaggaaatgaaggaagcagaaagcgaaaaatataacagcttacagaaacatgtgacagaatatcagaaggcgggagaaaattttatggcgtccagcatgattcatcttgcaatcatacgatgcataatagttaaaacagaatttaataatttggacaggctgcgtctgggtgtgatccttccagacggggctgtcagtggaaacagtcatcttaagaaaatgatctgtgaacagacaagagtgacctatgaccttgaattttacagggaaaaatacggggaacaaatgaagacagatgaactgtatctaggatattatcttcatctgattcaggacatattttatagaagatatgtatattctgagcatcactttaactcatccattccagagaatgttgaaaggctgcatcaggattatgaaaatacaaattggtttgtagcgaagcagtatggattggataagaatatgctccggacgcagacactggcaggtgagccgattatggaattagcagattttcgtgagcaggaactggtaagggaagtacgtgaacaatttcacccaatggaagaaaaaagcagcttttttctgaccagagagatgatccgggaatttattgacagggcgacggaaatctgtctgcatgaactgaatcagcttgcgcagggaaaagccggacttgacagttttgagtggagctggataaaacaaggatagaaataaagatttaagaatactggctggaggcacagatgaccaaggtagacgagttactgatcgagggaaaggtgaaggaagccattgaaataatgtgcgaccttccggaatatgagaaagaacgagaacaatatattgacttatttgaaaacgagcattatcggcaatatgaagtggatggaatactgaatgagatactgcttgcatatcagcaatatttcagagacgtgttttattgcaatagtgatgaagaaattgccgcagacaaactgataagaaagctgtgccagactttttctatatcggaaaaagagaaagacgcactggaagatagattgcaggaactttttgaacagaaaggctaccatgcacttttcggaaaaacgcaagggtattttggaccatacatctggaaagatacggttccgacgtcttatcagatagaattgccggaaggcgtagagcagtatacggtaaatattttaaaaggttttgtatttcggagctggatggattatctgacctttggaaaatacggaactggcggctgggcatctgaggacggaacgattcaatgcatcgagagtgcctatgattttgagagtgagaaatttaccgtttcacttttaaagaatgaagcacagcacgcaaaagacctgaaggaatatccagacattactccggcggaactggaatacagggcaaaattagtggaactgtattattcaagtgattgggaattattagggaaatttctgaaaatggcagatgcagacaaagtgaatgacagtcatgcaatggcttccatgcgtattaaagaagaattttctgatggaacatatgaggatttggaaaaaatcaaagagagagcgcttgaactatttaaaatcaatacgagggaactaagacatggcagcaaataaagtatttattgtggaggatgatgctgtcattgccagggcagtggcggcacatcttacaacatggcagatgcaggtacagtgtgccggcaattttgaaaaaataacagaagaagtggaagattttcaaccggacattattatcatggatatcaaacttccgtattataatggattttactggtgtgcggaaatccgtaaaacgtccaaagtaccgatcgttttcttatcttctgcggatgataacatgaatattgtgatggcaatgaacatgggcggcgacgattttatcgcaaaaccatttgacttacaggtgctgaccgcaaaattacaggctgtacttcgaagaagctatggaagcgaactcgcaagccactcgatcgaatgtggagaagtcgtattgaatctgaatgatacttcagcggcagtccgtggagagaagatcgacctcacaaaaaatgaatttctgatcttaaagacgttaatggaaaaacagggaaaagtggtaagccgcgaagaaatcatggaacgtctctggggcaatgatgaatttgtggatgacaacacgctgacggtcaacatcacaaggatacgaaaaaaattagaagccgcaggagtgaatgattttatcacaacaaagcggggacttggatatcttgttggagcataatgttgaaattttcgtcgcaggcagcaagaaaatcatagagagtttgttttcttttagcgaaaatacaggagttagataatgagcaaaaacatgcagatgaaaaaagaaacaggaaaaatttcacatagaaaatttttgtcagaaaatataggcttattattgatagctcctgttttcctgctcctgatgtttacagtatccaatttatatcagcttccggcagaatatgtcttttatctaacaagcatatttctgatactctgggtgaccactttgtgtatgcagtactggggattccggaagagaacagagcaatatgaaaaagaaagcaaggaaaagcaggaaagtaattcaaaagagagcagacaatgggaagaattacaggaaaagcaggacttttttgcattgtgggcacatcagatcaagacaccgatcgcggctttgaatcttcttttgcagggagaaaagcaggatgcggcagtatgccgacaggaattatttaaaatagagagttacgtggagatggcattgaattatctccgctttgaagagatgagcaatgatcttgtgcttgagcgaaattcactggaacaattagtccggcaggtagtaaaaaaatatgcagcaatttttatctacaatcatatctccattcagctggaacacttgaattatacagtgcttacagatgagaaatggttttgttttgcattggaacagattttatcgaatgcattaaaatacacaaagcagggaagtgtgaagatttcggcagaggagacagaaaatggtttgcagatatttgtgaaggacaccggtatcggcattaagagggaagatctgccgagaatttttgaaaaaggttttaccggatataatggcaggatggataagaaggcgagcggtcttggactttatctgtgcaaaggcgtgtgtgagaagctcggacatgaaatccgggtggtttcggaagagggagaaggaacgacggtgatacttactttgcagttggagaaagtgcagcagagggatcttgtgaacatgtaaaatcctgaaaaatgataattgaatcaatatggaaatttaatattagggtatgttatactaagagaaagcaagtaaaaatgggggatttcaaatgagtgcacagacagattgtgagatgctttctattgaagtgatggaagcatatgcaggtaaatataacctttctggtaataaagttgtagaattatttcaaaaaaatcaagtttttgaaaagatgctgattcagcatgagtatctacatcaagttagttttgaagaggttatggagtttgtagaaaatgcaatagcagatgattcaagggaattggtagtatatcatggtacttgttctgaatttgagaaaattaatctcaataaatcgcataaccgacgtgattttggaaagggattttatacaacaatactgcaatcacagtcaaaggaatgggcatacaggctttcattacgagaaaaacggaacgattattatgtatatgaatttttatttgaggaagtgccttcactaaaagtgaagcgttttgacagattaaatgaagaatggttagaatttattaagaaaaatagaagtaaaggcggtttgcagcatgattatgatgttgtaattggaccagtggcggatgacaataccatggaaacagtgcaattatatatggcgaatatacttacagcggaagaggcggtggaaaggcttcgctataataaggtaaataatcaggtatcgtttcatacagaaagggcactgcaatatgtaaaattagttaggagggtttcttatgccagaaaagatatatagttttaatggaaaagatattacgatgaatatatgtatacagattagagatgtggtgaaattactacaggaacattttcatattgcttttgaagaagcagtattgcttttttataaatcggagacatataagacactacaggagacagaaaacggtttatgggctgagtcagcggaatatatagctgacagatattacgaagagcagggaaaataacacttttcttacaaaaatgtaagattacgacaaggaaatgtaagccaaagaaagggcactacatttccttttttgctatgatagtcttacaaacaaggaggataaatcctctgctcctgtaaaagcagtcgcattttccttcggaaaacaaggaggattatatgtcaatcttagaagtcaatcatatcaaaaaagtatataaaacacgtatgggtggggacgaagtcaccgcattaagggatgtgcatttcagtgtggaaccgggagaatttgtggcgatcatgggagaatccggaagtggtaagacaacgcttctgaatatccttgcaagccttgatacaccgaccgccggaaaagtgttagtggatggaaaagatttcaccacattaaaggacaatgagcgtgcgattttcagaagaagcaatctcggattcatctttcaggattttaatctcttggataatttttccatcgaagataatatcaaactgccgctggtgctggcaggagaggattataagaaaatggatgcaaaagtacaaaaggctgccgggcagcttggaattgtggagcttttgaagaaatatccgtatgaagtgtccggtgggctgaaacagagaactgcgatcgcaagggctttgatcacaaatccaaggatccttctggcagatgaaccgaccggggcattagattccaaggcggcgaccaacctgttaaagcagctccgtgagattaaccagacaggtcagacgattcttatggtaacacacagcaatgtggcggcaagctatgccgaccgtgtcatgttcattaaggatggtgaagtattccatcagatttaccgcggtgatatgacaagaagtgcactgttagataagatctgtgacgcagtgaccgttctgatgagaggaggagaggacagtgaatcataagcttctgacaaaatttgtgttcagtggaatgcagaaaaataaaaagacactgatcccatatctgcttgcaggaacgatgactgtcatgatttattatattttgcagtcacttgcgcattgtccatacatttataaagatggagtggaagcgttttatggtgcacagattatctcgattttactggaaatcagcggtcagatcgtagcagtctttgcggcagtttttcttttttatacaaatcagtttatgataagggcgagaaaaaaggagatggggctttatggagttcttggaatgtccaaaaagaatattacctatattttagctgcggagagcctgattcatgctttgaccagcattattacaggaattatgatgggaacttttctgaacaaattaatgcttctcattctctataagattatcaatcagccaccggtaaacggactgtttttctcagtggaagcactgaaaagtacattggttttatttgttatcctttttgcagtcagtctgatttataatgtggcttccatccgggttggaaaaccgatcgcactgctgcagagtgacagaacaggggaaaaagaaccgaaagtgaaagttcctatatttattcttggaattataacactgactgcgggatataagctggcactgtctgctaagtcaatcgggggtgcggtcaacatattatttgtcagcattctgcttgttgtgatcgcaacctattgtctttttacagccggaagtatttttatcctgaagtgcatgaaaaagaatccgaagttttactataaaacaaagaattttatcagtgtatcgaatctgatgttccggatgaaacataatgcagcaggactggcgtccatctgtgtactttctacaggtgtgatcctgttgctgacctgtggcttttcactgatgatgctcatcggaaaaaatatagatgacagatatccgacagatattaaagtggcagaaactgtttcagaggcaggaaaaggcatggatgatttcgttactatgaataaagcgttgcagcaggatgggattgtgactaccgaccagatttatagacagtaccggaatatcatggtcacggaaaaagatggaaaacaaaagattgcagacccggatacattcgacagtgacatagcctccgatatcgttacgtatctgttgtctgctgctgattataacgaatatgccgatatgaatctgacacttaaggatgacgaaatactcatctacagttcaggaaaagaatggaaaaaaggtgataacctgaattttatgggaaaagagtatacagtagcaggagaggcagagtattctgcaatccgctatattattgattcgaccatgtcaattttcgaacgtgaaattcttgtctttccagatgatgagcagatctgtgctctgatggcggaagccggacagagagtgaatccggatgagtatgaagtcttcatcggataccagttagaaaaagctctgacagaagaacagatggaaacggtcagagctttgatggaactggggggattaaaccgtgaagcaattcgttttaaatcagaggagatgagcgctttttatagtatctatggtggaatcttttttgtaggaatgtttctggcagcactctttctcatggcaacggttatgatcatttactacaaacagatgtcggaagggtacgaagaccagaaacgatttcagatcctttccaatgtcggtctgactgaaaaagaagcaaaagaatccatccggacacaggttatgttattattttaccttccggtcgcagcagcgattatgcatatgatcgtggcaagcagcgtggtcagactttttttacggatgatactgatcgtggatacctttacctttaacatggcgatcgcaatcgtgagcatgatcttccttgtgatctatacgattgtatacaagatcacttcgagagaatactacaagatcgtgaataggaaagattaaatttgccctattgacagcacaatgctttttacttggctctctactgaactacagcatacatcaaactattgaaatttggcatcgcacttgtgatgcctttttcaatgattttcagcccatttcgcagcaactcattctcaaaagtactgaatgaaaccatcctgcaagaagttccagcaaccatcatttttccggtttcatgttctctttcctgaagctcaaaagcgttgcttatatcactttgcatttcataatttccgtctcccattgaacaaataagtgcaattccatctgatttcaaatgacgatgtatgaattgataaaacccgtttctgtcttcatctaaaactaacatatgaacaactgcaaccgaataaatgaaatcaaatttctcatccaaatcacttgataaacaatccaaaaccatgaattttgattcaaaatcaggcatttttttcttgcaatagtttattgcttcaggcgatatatcggttgctataaggtgaaagccattttctaaaacggtggcggagtctctgccttcaccacacccgatttccagtaacgactgctcgggatgaaggtgatatctcttaataatatccataacaattggagtatttttcatctgtgtccaactgacacccttttcatgagcggttttatatcgatcttcataggcttcataatattttcggttctctttttgcatggatgccccctcattaaaatttgtataccatccaaggcggagcgtatgcttcaccgaatggttttttatggtgatagtttatcatactacgcagaatgtgtgtaggttttcgcatcagatacaaaaagaatattatcatacagtaccgcaggctaatgtgtttttggggaaaccgtacgtagcttacagataaagaaatcaaagaacctgccgacaggatccataacgatgaaaaagcagaaaaagatgcatagaagaattaggtatgataaaataagagaagagaagtcagatgacgttatagataccgagaaacgataaaaggtggggcagtcagatgaaaaagaacattctattcggacttataatattatcatttgttcttgcaggctgtaagcaggatgtaaaagaagaaaaagaagcatcaacagaagtaacaaaagaactgtccggcgggcaggaagaagttacagagacaccggaacatacagagacaccgggacagaatacacaaagttttaagggaagagtgattgagaatcagacatttgaaattcagctggatgactggggaatggtaacatttacatcagttgcacctgaagagaattcgaataatccagaattcttattagtgaagaatgataaagttatatatgagtttccggaaataaaggcagacgcttcggattcatttaaacagatcagtggtgtaaagttttcagatgtgaatatggatgggaaaaaggatgttttgctgctactccaatactgtaatgatggagattcgtggaatatgccggttatatttttacaggaaaatccggacaatatgatgtatctggattatccaaatctggaaagctacaaagtcgaagcgaaaacagaaaatggcactcctttttatagggatactttttttgaagaatttctcggtaagcagcatctgacagaaaagctttctgatatggaaggcgtatggacagattatgtagagtatttggacagcatatcaggtgccactatggacatccaaaagcagattgaggtatttgcacaaaacagggacaagtgggcaactgacattgattttgccgatgaacaatataaattcacgctggctgatctggatatggacggacaagtggaacttttggtttcacattctggcggcacaggatttttttcttatacaagtttttacaatgtagataaggatggaaaactaaaagaactgaatacgactttttcagaatatgaatcccagccggatcttatggatcaggtatcggatgaaagtgatgtgatggtatattctaatatcataaatggaaaaggatattataattatatcgtgtacgatctcatgaaggagtcaccgagcagttatgtataccgtgtcagttcgcttgcaatcgttgatgatgttgtaacagaaacaaaactggcagtcgaatacgaaacatatgatggtccggattatgcagcgacagtcagctataaggactataccggggcagaactgacagaggaagagtattatgcttatgcggcagcctattatgatgcacaaaatgcagcagaacaaagggcacattttcaatggaaggacgtcagtgatatcgtaaatgcgagtgacgaagaggcagtccaaatgcttacggaagtgtataacgcatacagttttgattaataaggtttaggtgtcaaaaagcgggaaatagactttttgatacctgacttttaataaaaaacagaaagcagcacggttaagagaaacgattaaaaaaaactgtcatatattaaagtgtacctgaatatagcacgttgcttaacagggacaataaaaaacaggaaaggaaaaatatatggcacgttttacaaaccaggcacaattgcgttatggaagatccattgccaattcaaatatagcagtcggtgagattctggaagttttatccgctgcaaaggaggcagtgcggaatacttacagacaaaacgatacgatcacctatgtgatcagtattgtaaatgcgggaacgttagcttatacaggacttaccattacagacaatctgggagcatatccttataatacaacaacacttgttccactggattatatggaaggaacagcgaagtattatatcaatggtgtattgcagccggcacctgcagtaacagccggaccgccacttgtaataaatgggatcacagtaccggcaggcggcaatgcagtgatcgtatatgaagcagaagtgaatccgtacgcaccactggctgcaaccggaaatattgtaaatacagcaacgatcacaggcggaggcattacgccgatcgaggtgacagagacagtggtaacagataatgagccgctattaaatatcacgaaatcgatcagcccggttccggtaacggaaaatggaacgctgacctatacgttcctcattcagaacaccggaaatactgccgcggatgcagccacagcagcagagatcatcgatacgttcgatccgattctttccaacatagcggtaagctataatggaacagcacttgtggccggaacagattacacatacaacgaaacaaccggattatttgcaacgactgccggaaggatcacagtgcctgcggcagcttatacgcaggatccggctaccggaaactggatcgtaacaccgggaacaggaaccttaaccgtgacaggaacaatctgatcacaacgcatataaagagcaattccacagtattaccggagaaagaaaaggatttttgcaaaataagcggaaaacactttcttaatgtaatgtgatatagtataatgcaacttaagaataatttcaggaggcagagaaaatggatatgaatatcgtatgtctggatctggagggcgttcttgtgccggagatctgggttgcatttgcagaagaaacaggaatcccggagttaaagaaaacgacaagggatgagccggattatgataaactgatgaaatggagacttggaatcttaaaagagcatggtcttggattgaaagaaattcaggaaacgatcgcaaagatcgatccgatgccaggggcaaaagagtttttagatgaactgcgcagcatgacacaggtgatcatcatcagtgatacatttacacagtttgcagcaccacttatgaaaaagctgggatggccgacgattttctgcaattcactggaagtggcagaagatggcgagattacaggttacaggatgagagtagaaaattccaagtattcaacagtaaaagcactccagtcgattggattcgagacgatcgcaagtggagacagccataacgatcttggaatgatcaaagccagcaaggcaggctttttattcaaaagcacagaacagatcaaaaaggataatccggagctgccagcgtatgagacttatgatgaattaatggaagcgattaagaaggcgttataa

SEQ ID NO: 98 - DNA, 15035 bp, unidentified
  source 1..15035: mol_type = unassigned DNA
  misc_difference 12874: note = a, c, g, or t
  misc_difference 12875: note = a, c, g, or t
  misc_difference 12876: note = a, c, g, or t
  misc_difference 12877: note = a, c, g, or t
  misc_difference 12878: note = a, c, g, or t
  misc_difference 12879: note = a, c, g, or t
  misc_difference 12880: note = a, c, g, or t
  misc_difference 12881: note = a, c, g, or t
  misc_difference 12882: note = a, c, g, or t
  misc_difference 12883: note = a, c, g, or t
  misc_difference 14984: note = a, c, g, or t
  misc_difference 14985: note = a, c, g, or t
  misc_difference 14986: note = a, c, g, or t
  misc_difference 14987: note = a, c, g, or t
  misc_difference 14988: note = a, c, g, or t
  misc_difference 14989: note = a, c, g, or t
  misc_difference 14990: note = a, c, g, or t
  misc_difference 14991: note = a, c, g, or t
  misc_difference 14992: note = a, c, g, or t
  misc_difference 14993: note = a, c, g, or t
ttactcatcccagcttagcctgtgaagattgcccttgcacaacaggtcggggtagttccattgtctgagcgtttcatatacggcaaccgctacagaatttgacagattaaggctgcgtgcctcattaatcataggaatacgcactgtggtgtcgggattatcgtgaagaagctgctccggcagtcccgctgtttctctgccaaaaagcaggtatgcaccgtcgggatatttaatgtcggaatgtatatgccgtgcctttgtggagaaataataataagggccgttggttcggctgaaaaaatcatttatattgtcataaacagtaatatcaagtaaatcccagtagtccagtccggctctttttaccgccttttcgctaatgctaaagccaagaggccttactaaatgcagccttgcaccggttgccgcacaggtgcgtgcaatatttccggtattttgcggaatttcgggttctaccaaaactatattaagctctgccataaaatatattgtcctttctgttataaattattactctctgtacaaaatagaaaaaggaagtgattttaaattgaacaacgaagttttacttctggaaaatatattaacattctatactctatacaggaggtgtaaaaaaatgactaaaaatgcaatgagcgttgccaagggtgttgctgccgtggtagctaccggtgtggtagtaggctatgtaagcaacaaggttatgcagaaaaaccctaaaaccgttaaacgcaaggcaaacgatgccgtaagtgcaatgggacaaattgtaaacgatatttcttatcttttaaaataataacaagcaacacaaggtgcacagggcaagctttccctatgcaccttattttcagtttttctgccttataggcttttctgggcataaataaagcttaccttatagttcctccgcctactacatactctccgtcgtaaaaaacaacagcctgtccctttgtaatagccctttgcggccggtcaaactctactactaccttgtcgttatctacagggtgtatagtagccggagcctcattttgactgtagcgtgttttagccgttaccttaacatcactcttaggagcgtctatggcaatccagttaaggtctgcagccgtaagagtgtttgtaaacaggtctgaattttcgcccaaggttactacattgttgtcagggtttttatcaagtacaaatatagggtgccggtagcttatacccaagcccttgcgctgacctatagtgtagtggataatgcccttgtgtctgccaagcactgtgccgtccttgtacacaaagtccccctgtggggtatgcacgcccattgtattttccaaaaagcctgcatagtcgccgtcctttataaagcatatgtcctgactgtcgggctttctggcattaattaaattatgctcctctgccaaggctctggactgctcctttgtcattgagcctaaagggaacaaagtatgccttagcatattctgtgtaagcacatacagcacatatgtctggtcttttctgccgtcaaccgccttttttataagcaccctgccgtttgagtctacttcccgctgtacatagtgaccggtggcaatgtagtcgtaattcaaaagctttgccctttcaagcattttggcaaactttatgtatttgttacactctatgcaagggtttggagtttcgcccatttcgtagcttttggcaaatctgtttataacctgctccttaaactgctcgccaaaattaaaaacatagtggcgtatgcccagcttgtagcatactgttcgggcgtccataacatcctccagcgaacagcaggtgcgtgtattgcttacgccaatatcctcgttattaaaaagacgcagtgtagcaccgtcggtttcgtagccctgctgttgtaaaagcaaagcacaaacagagctgtctacaccgccgctcatacctaccaaaactctttcagccatatttttcaccttctaaattcaaatagtctgctttgtagctattataacacattacaaaaaatacggttacaaaaatttatgggaatacaacccctgtattcccataaataaataccaaataccgtttaaggcttattatattttaacgatatttataaattagtccttcatcattgtaacaagcacagccttttgtgcgtgcagtctgttttctgcctcttcaaaaatctcatccgcgtgtgcctcgaaaacatcggctgtaatttcttcgccacggtgtgcaggcaggcagtgcagtaccatacagtctttatttgtaacgctcataaggtcagcgtctacacagtaaataccggcaaaggattttgcacgaagctgtgcctcctgctcctgtcccattgaagcccatacatccgtataaactacatctgcattctttgcggcctccttaggctctctgtacaagccaaacttgtcaccgtattcctttgcaaaatcaagaatttccttaggtgggtcgtaaccctcagggcaagcaacggtaacgctcatacctgttttaagtccgcctacgattaatgagtttgccatattgttgccgtcgccgataaagcaaagctttagcccctctaaagagcccttgctttctcttattgtcataaggtcagccataacctggcaagggtggcagaaatctgttaagccgttaattacaggaattgaaccgtattcagccagtgcctctacctctgcctgctcaaaggttcttatcataatgccgtcaagaaatcttgacaaaacccttgcggtatcctgtacaggctcgccacggcctatctgcatatcgtttgcagacaaaaacagtgggtaaccgccaagctggtacatacctacctcaaaggaaacacgggttctggtagacgccttttggaatatcatacccagtgttttgccggcaaggtgcttgtgctcaataccgtgcttttgctcatatttcagctggtcagcaaggttaagcatttctataatctctttaccgctgtagtccagcagctttaaaaaatgtttcattaattgctctcctttatattgaatttatattaattaaatactaagtaattattgtctgaaatattaaaaattacagacacttcttaaatatttcaaggcccttgttaatttcgtcctctgttatgttcagtggcggaaggaaacggattagagtcttggctgtaagaaccaaaagtccgttttcaacacattttgcggctacctctttagcgttgtccttttcaagtacaacgcctatcatcatacccataccacgaacctgacttacaccgtccatagcggacagcttttctttaatatactgtcccttttcctgtacagactttaaaaattccggagtatttacacggctaagcacctctaaagcaccggcacaggctatagggtttccgccgtaggtagtaccgtgagtacccggcgtcattacatttgcaagggcctcactgcacaggcaggcacccataggcaatccgccgcctataccctttgcagaggacacaatgtcgggcttaattccaaactgctcgtagcagtaaagagtacctgttctgcctacgcctgtttgaacctcatctataattaaaagcaaatcgttttccttgcagtagtcggcaagctgctgtacaaactccttatcaagcgggtttacaccgccctcgccctgtataagctccaccataacagcacaggttttttcgtttaccttttcttttacgctgtttatatcgtttgccttagcaaaggtaaagccctcggtaaacgggaaaaagtaattatgaaaaacctcttgacctgttgccgccagtgttgtaactgttctgccatggaaggaattttcaagagttacaatttctgttctttcttttccgtacttttcaaagctgtactttcttgcaagtttaattgcacactcgttagcctctgcgccgctgttggcaaaaaacaccttgctaaagcctgtagccttgcaaagctttttggctagctctgtttgcagtgggctgtaatataaattggaaatgtgctgcaatgctgccgcctggtcagaaaccgcctttacccagccgtcgtcactgtagcccaggcagtttacgcctattccgcttgtgaaatcaatatattccttgccgctttcgtcccaagcccttgcacccttgccttttaccaaggctacattaaacctgccataggtatgcataaggtattggctttcgtcggcctttatttgttccagtgtcataatacttcttccttatacttaaattattttttctcgtaggagtaaacaaaaatatcgtcacgcttttcaaagccaatactgctccaaaagctctgaccgcaggaattgtcctgataggtaaaaatatgggttttatgtattccctgctgtgccagcttctctatagccattgtagccatagcttttgctatgccctttcttctgtattgcggcataaccgccatatggtgtataaagccacgcctgccgtcgtgacctgccagtacagttcctactattttaccgtctgctacagctatttggctaaggcccttattcctgttaaggtaatactcaatttcttctctttggtcggcctctgacaaggctcttttagaggtaatttgccacatagcaaatatttcatcgtagcagtctatagtcatttctttaatttgtaccgacataatccaccccatataattttaaaatataatgcaaacctgccccaatagaaaagcagtccattaataaaacattgtaccgataccctcgtcagagaacatttcaataagaattgaatgctctattctgccgtctataatgtgggcacgcttaacgccctgtcttactgcctctacacagcagtcaattttaggtatcataccgccgcttataatgccctcttttttcagcataggaacctcgcttacattcacaacaggaattaaagtattctcatcgtccttatctctaagcaagccacgaatatctgtcattaaaataagcttgcacgcacccagctttgcggctatttgtgcagctgcaatgtctgcgttaatgttgtaaacattgccgtcgtatccgcctgcaacagtggagataataggaacatagccgttgcttacggcgtcattaataacctgtgtgtttacctctcgtatttcgcctacaaagcccaagtcatcagctgtaataagcttgtctgccataagcatttttccgtcaagtccgcacaagcctacagccttgccgctgtggtcgtttaggcactgtacaaggcttttgtttaccttgccggcaagcaccatttcaacaatttccattgtttctgcgtctgttacacgcataccgtttataaacttgctttccttgcctgtttttttcagcatttggcttatttcagggccgccgccgtgaacaagcacaacatttacgcctaccaagtgcattaggactatatcgctcataacagcacttttaagctcggggcttatcatagcgtttccgccgtatttaacaacaatggtttgtcctgcgtacttctgaatatacggcagtgcctgtataagcacatttgctcttttttcgttagaaatatccattttttattcctcgctgtgtaaattaaaatatactgttttaggctttagaaagcaggcggtataatttcaagtcctgttttttcgtcaagaccgcatacaatattcatattttgaattgcctgtccggccgcacccttaaccatattgtcaatagccgaaacagccaccaatgtgcctgtgcgattgtccatatgcaatgaaacatcgccaaagtttgaatacttaatgttgtgaatatctgcaacctgtccctttggcaaaagtcttacaaagtattcatcgttataaaactcctcgtaagcctgtcttacctgctcctctgttacgccctccttcagcggtgcataaacagttgaaagaatacccctgtttaccggcagcaaatgaggaacaaatgtaatcttcaccggcttgtttgccaagtgtgaaagtgtttgctcaatttcaggagtatgacggtgacaagcaaccttgtaagggtgaaagccctcgttaaggtctgtaaagtgagtgttttgggacaagcctctgcctgcacctgtagcaccgcttttgcagtcggctataatgccctttgtttccactaagcctttagctacggcagggccaatggcaagaggtacgcctgttgtgtagcagcccgggttggcaatagttttcttgccctttatattatctctgaaaaattcaggcagtgcataaacggagtttttatgaagctccttgtcggtatattcaccgccgtaccattccttgtagtcgtcttcgttttcaagtctgaagtctgcacccaggtcaataaaaatcttatccttatcagagcacaccttagcaagctcctgtgaaagtccgtgtggaagtgccgcaaatataacctgacatttgtcaacaacccggtctgcattctcgcaaaccatatcgtttaggttgtaataagacgggtatacctgactaatagccttaccctcaaaactgactgagcttattgccgtaagctgtgcctgcgggtggctcataagcagtcttacaagctctgcacctgcgtagccggtagctcctataattcctaccttaatcattttatcatcctcttaatttttaatttatttctaaaaatctattttcaaaaccgtatgggtaattataattttactctgaaaattatttaataagctctctaacctctttaacggcgttaagtacatttgccgggccgccgtatgggcttctttcctttacgcacttttcaagcgagatggcctcgtaaacgccctcgtcaaaggtgtcgcaaattgccttgtattcctctataggcagggtttcaagggtttcgcccttttctatgcacagtgcaaccaatgagcctgttgccttgtatgcatctctgaaaggaagtccctttttaaccaaatagtctgcacagtcggtagcgtttataaatccgcctgcggcagccttgcgcatattttgcggaataaccgtcattgtatcaagcataggcgtaaaggcagtaatacacattttaacagtgtcaacagcgtcaaacacagcctccttgtcctcctgcatatccttattgtatgcaagagctatacccttcattgctgtaagcaagccctgcaagtcgccgaacactctgccggatttaccacgaacaagctctgcaatgtcaggatttttcttttgcggcataattgatgagccggttgaaaaagcgtcgtcaagctcaataaacttaaattcccatgagcaccacataataatttcttctgaaaatcttgaaaggtgaaccataataatagacagtgccgaagcaagctctaagcagaaatcacggtctgacacaccgtcaaggctgtttcttgtcatactgtcaaagcctaaaagccttgttgtaatgcttctgtctatagggtatgttgtgcacgccaatgcacagctgccaagagggtttacattcattcttttctgtgtatcctcaagtctggacaggtcacgcaaaagcatttcggcataagccataaggtggtggccaaaggttataggctgtgctctttgcaggtgtgtatagcccggcataacggtttcggcatactcctctgccttgctgcaaataacctctattaagcccttaacaagagattttaattcatctatctgatttcgcaggtacagtcttacatcaagtgcaacctggtcgttacggcttctggctgtgtgcagtcttttgccgttgtcacccagtctttttgttaattcaccctcaataaaggtgtgaatgtcctctgcctccatatcaatgcttagcttaccgctttctatgtcggccaaaatttcctgcaagcccttgcagataatatctgcctgctctttttctataatgccgcactgtccaagcatagttgcgtgtgcaatactgcctgtaatatcctccttatacattctgctgtcaaaggatatagatgagttaaaatcgtttgttgttttgcttatttccttttgaaatctgcctgtccacagcttcatttgtttcacctcataaattagtatatgggacgagcggcaaaaagcacccgtccctttagtattaattgctatttaatagtgcctaatcaaacaaaatcacttaattaagcccttttttgctcttacctctatcggcaggccaaacagattaatgaagccctcagaatcattctggtcgtaaacctcgtcctcatcaaatgtagcgatctcctcgtcatacagtgagtatggtgaagtaacgcctgcatcaataatgttgcccttgtacagctttagcttaacatcgcctgttactgtctgctgtgtgctgtcaacaaatgctgagatagcctctcttaatggtgtgtaccactgaccgtagtatacaagctctgcaaaacggttggcaacaatctctttgtaatgctgtgtatctctgtcaaggcaaatttcctcaagctttgcgtgagctgtatatagaattgtaccgcccggtgtttcgtatacgccccttgccttcataccaacaagtctgttttcaacaatatcggttataccaatgccgttttctccgccaagcttgttcagctttttaataattgaaacgccgtccagcttttcgccatcaatagctgtcggaatacccttttcaaatgaaattgttacatatgttggcttgtcaggtgcctgctcaggtgaaacgccaagctccaaaaagccctctttattatacattggctcgttagccggattttcaaggtccagtccctcatgtgacaagtgccacaggttcttatcctttgagtagtttgtttctctgttaatctttagaggaatcttcttagcctcggcataagcaatttcctcttctcttgacttaaactcccatgttctccacggtgcaataattgtcatatccggtgcataagctttaatagcaagctcaaaacgaacctggtcgttacccttacccgtacagccgtggcaaatagcgtcagcaccctctgccttagcaatttctacaagtcttttagcgataataggtcttgcaaaagatgtacctaacagatacttaccctcgtaaacagcacctgctttgattgtagggaatatgtagtcctctacaaactccttgttaaggtcttcaatatacagctttgaagcacctgttgcaatagccttttcctcaagaccgtcaagctctgtaccctgaccaacatcgccggaaacagcaataacctcgcaattattataattttcctttagccaaggaataataattgatgtgtcaagaccgcccgaataagccagtacaacctttttaacatctttctttttctttgccatgataatgacctcccgtatatttaaataaaatgcttttatttattgattacaagttatattatactcacgctatgcaaaaaatcaagaaatatttgtatatttattcaaacccttgattttttgtagcaatatatattttaatttaacatctttaaaaacttatctctagattttccacattttcaacatattttttgacaacagctgtacttcaagctgtttatgagtatacattattcaaatttttatgcatttttattcatatatacgcaaggtattgtatattgatttaagtaatgctataataatttcagcagctattaacatattttataatacacatttctaaaaaggagattttactatgagcagctttaagaaaattaaacccatagaaattacagaaaacccgtttaagctgataggcaatgactggatgcttgtaacagcagaacatgagggcaagtgcaatatgatgactgccagctggggcggtgtgggcattatgtggaataagcctgttgccttcacctttataagaccacagcgttacacctttggtatgcttgaaagcgaagatatgttctccctttgcttcctacctgaaagctaccgcagcgtgctaaagctttgcggcacaaaaagcggcagagatattgacaaggtgtcggaaacaaacctgactgttgagcatactgacggtgtgccgtactttgcagagtctaagcttgtgctggtttgcaaaaagctttacggtcagttcctttcagagaatagcctaacggaaatgtcgctaaagtccaactacaacgccgagggcagtgactggcacaagatgtatataaatgaaattgtaaaggttcttgtaaaggaataatatgtcaaaaacagcattagtaacaggcgcttctaagggtataggagcagaaatagccctgcagcttgcaaaaaacggctttaatattgccattaactacaacaaaagcaaggcagaggcagaaaaggtgcggcagaaaatagcagaccttggaggctgtgccgaaatattccaagcagatgtaggcgactatacagcagtaaaaaatatggcagacagcatatacaagaggtttgggtttattgatgttcttgtaaacaatgccggcatagcacagcaaatactgtttacagatattacaccggaaatttggtcaaatatgataagcacaaaccttaccggtgtgtacaactgctgcaacactgtgcttccgaaaatgatacattcgcacacaggctgtataattaacatagcctctatgtggggagaaaccggcggaagctgtgaggttcactactcggcagccaaggcaggagtaataggcctaacaaaggcattggcaaaggaagtaggtctaagcggaataagggtaaactgcgtttcgcccggggtaataaaaaccgaaatgatgtcctccttctcggaggacaccctaagagagcttaaagaggaagcccctcttaacaggctgggcactgcactggatgtagcaaatgcggttgtctttttggcagatgaaaaggcatcgttcattacaggtcaggtgctaagcgtaaacggcggaatactgatataacaaaataatacacaacgaaaaaggctttttgattgggaacattccctttcaaaaagccttttttgtatatacatcatatggttttcattttatcgatttccgatttttattttgttaattacaaagcctttggatttatccgagcaaagacacctcttttttgtcattcatatagaacattgcataggcaaaggaagcaagcattaaaagcaggctctataataaaagtcgtggtaagtaaaaaagcctgcaagcctagacaaagctccacgcattttaaaacgacacaaggcagacacctttttgagagtatctgccttgtgttagttaatttataaggatttacttattatcttcaaatgtctgagaagccaggaactgtaggtgagcaagctttttagctgcctgctgttcagctctgttaaacagaagatctgctctctcagggtttgcacgagaaagtgcgttataacgaacctcgcccataataaagtcacgatagctcattgtaggagccttagaatctacgataagcggatttttgccctgctcaatcaaacgagggttgtaacggtagatgttccaatagcctgactgtacagcctttttctcttcgatttgagctattgtcataccgcccttaataccgtggttgatacaaggtgcataacaaataataattgacggaccgtcatagctttctgcctcaacaaatgcctttatacactggttatagtcggcacccattgaaacctgtgctacatatacattaccgtatgtcattgcaatagctgcaaggtcctttttgtttgtagccttacctgctgcagcaaactgtgcaatagaaccgctaggtgtagcctttgaagcctgaccgcctgtatttgaataaacctctgtatcaaatacaagaatatttacatccttaccggaggcgataacatgatccaagccgccaaagccgatatcgtatgcccagccgtcgccgccgaatatccacatagacttcttagcaagctggtctttatctgcaagtgtctttttagcaagcttgcctgcctcgcagtcacagccgctgatttcctcaagcttctcaataagtgcctgagcagctattttgttctcgcctgagtttgttattgttgaaaggtattcctcacaagcagatttaacatcttccttgcttgtcttttcggaaatttctcttacataatctgcaagtctgtcacgaatagcgttttgtcccaaaaccataccgtaaccgaactctgcgttatcctcaaacaatgagttatgccaagccgggcctctgccctctttgtttactgtgtaaggtgtagccggagccgaagcgccccaaatagatgaacagcctgtagcgttggcaataaacattctgtcgccaaacagctgtgtagcaagctttgcatatggtgtttcaccacaacctgcacaagcacctgagaattcaagcagcggctgcttaaactggctacccttaactgtagtttccttaaacttagcggcaacatcaggcttaacaggcaggtcaagaccgtaagcaaatacctcctgctgatccatttcaccgtcagccggcttcatctcaagagccttgttgcccttcttgccaggacaaacctgtgcacaagagccgcagcctgtacagtcaagtgtagaaactgtcattgtaaatgtcatacccggcatagccatcataggggctttctttgttgcggcaggggnnnnnnnnnncggctgtcatagcaacaggacgaatagcagcgtgcggacatacatatgaacagaagttacactgaatacaattctcggaattccaagacggaacatcaactgcaatgcctctcttttcgtatgcagctgtaccctgaggaactgtaccgtcaatgtggtttttaaacgcagatacaggaagctggttacccttgtaagcatttacagggtgcagaatagtatttacatactccaaaacctccggcttaccgttagttgatacaaccttttccagctcgccctcggcgtcagcccagcttgcaggtacctctacctttacaaagtctgttgcaccacgctcaatagccgcatggttcatatcaacaatagcctgacccttcttgctgtatgactttgtagcagcgtccttcatatatttaatagcatcgtccttagggataatgttagcaatagtaaagaatgctgactgcaaaattgtgttgatacggccgccaagaccgatttccttaccaatcttgataccgtctattgtatagaaattaatcttcttttgagcaataattctcttcattttagcaggaagcttttcttcaagctcctcgccggaccaaggacagttcagcaggaagctgccgccctctttcaggtcgtccaccatatcgtacttatgtacatatgacgggttatgacaggcaacaaagtctgccttactgatgtagtaggttgacttaatcggcttgtcgccaaaacgcaggtgagatactgtcaagccgcctgacttctttgagtcatatgcaaagtagccttgagcgtacatatctgtatggtcaccgataattttaattgagtttttgttagcaccaactgtaccgtcggcaccaagtccccagaatttacatgagcttgtgccggcaggtgttgtatcaggattttcaacaacaggcaaagaaagatttgtaacatcgtcaacaatgccgattgtaaatcttctcttaggctggtctgcttccatattgcggtaaacggcaataatgtcgccaggtgttgtatcctttgaagacaaaccataacggcctgtataaacattcacgcctgtaaacttagaaccgttaattgcggccaatacatcaaggtacaaaggctcaccaatagaaccgggctcttttgttctgtcaagcactgtaatatttttaactgtttcaggcagctggcttagcatatagtcagctacaaacggtctgtaaagtcttacctttagcaaaccaaccttttcgcccttagctgtcaggtagtcaataacctcttctgtacagtcgtttacagagcccattgctacaataacattttctgcgtcaggtgcaccatagtaattgaaaggcttatagtctgtaccaagcttttcgtttaccttgttcatatattctacaacaatttcaggtacagcgtcataatatacattacaagcctctcttgcctggaagaatatatcgtcgttttgtgcggtacctcttgttacagggtgctcagggttaaggcttcttcttctgtatgcgtcaactgcgtcccagtcaagcatatctgcaagatcctcatagtcccacatagcaaccttttgaatttcgtgtgaggttctgaagccgtcaaagaaatgcataaacggcactctgccctttattgctgacaaatgagcaacagcggcaaggtccatacactcctgtgggttagtagaacacagcatagcgtagcctgtttgacgacaggcatatatatctgaatgatcaccgaaaattgacaaagcgtgtgatgtcaatgcacgggcagaaacatggattacgctaggcaacagctcgcctgccattttgtacatatttggtatcataagcagcaagccctgcgaagcagtaaatgttgttgttaatgcacctgcagaaagtgaaccgtgaacagcacctgctgcaccaccctctgactgcatttctgttacctgtacttctctgccaaacagattttttctgcctgctgtggcatatttgtcaacctcatcagccattaccgatgaaggtgtaataggatagatagcagcaacatctgtaaacgcatnnnnnnnnnnggctgcgttgttaccatccatggttttcatttttcttgccat

SEQ ID NO: 99 - DNA, 8457 bp, unidentified
  source 1..8457: mol_type = unassigned DNA
atgacattcctcattcagcagacgctcatttatgccgtccctctgatgatcgtggcgcttgcgggcgtgttcgccgagcgcagcggtatcatcaacctggcgctcgaaggtatcatggtcttcggcgcattcatcggcgtctggttcgtgcgcattttgcagacgagcgacgccatcctctccctcaagcagagcggcaactgggtcgcacttcagggcgtggagcttctcacgatgctggtcgcggcggccttcggcgcgctgttctcgctgcttctgagctttgcctctatcaacctgcgtgccgaccagaccatcggcggcacggcgctgaacctgatggcccccgcactggtgctgttcttcatccgcatcatcgccaaccagaatacgctgcagatgctcacgggcgacgcggcgagctggttcatgatcaaaaagtctacgctcggcatcgacaagaacaccgacctcggctttttcggcgagacgttcgtcaacaaggtctaccttgcgacctacgtctgcatcctgcttttcatcatcctgtcgatcctgctctataagacgcgcttcggcctgcgcctgcgcgcctgcggcgaaaatccccaggcggcggattcgctgggcatcaacgtctacaagatgcgctacgcgggcacgaccatttccggcgcgctcgcgggcatgggcggcttcgtctatgcgctgacgaccgcaaactgcgcctcgaacggcgacgtggcgggcttcggcttcctcgcactggccgttatgatcttcggcaactggaagcccgtgaatatcgcggtctcctcgctgctgttcggcctcttcaagtgcatcgcggcgagctacgcgagcatcgacatcaacggcgacggcgtctacatgctcgccgagatcggcatcagcgcccatctctaccgcatgctgccctacatcgtcacgctgcttgtgctggcgtttacgtccaagagctcccgcgcccccaaggccgagggcatcccctacgacaagggccagcggtaacgtacatcaaaaagcggtatggcagtgccataccgcttttttgcaaacgaaatctatggagagaactatggagatcagagaaattacgactcccgatgaaaagcggcgcattacgcgcttgattttagaatcgctgcccgactggtttggtattccggaggcgcgcgaggaatacatcgaaaagagtgttaagcagccgtttttcgccgcgttcgacggcgagaacgccgtcggcttcctttaccttgccgaaacggggaaggatacggcggaactctatgtcatgggcgtgctgaaagaataccaccgccgcggcgtcggcaagatgctctttgccgcagcgaagcagcgggcgaaggagcttggctactcgtttttgcaggtcaagaccgtgcagatggggaagtaccctgagtacgacgcgacgaaccgcttctatctcgccctcggttttggcgagtttgaggtattcccgacgctctgggacgagcggaacccgtgtcaaatctacgtgatgagcctgaaataagaaaatgttggaactttttcccgccgttttgcgtctataaaagcagaaaaacaggggagggaagcatatgaccgtccgcgaaccgaaaaaacgctctaatttgcggctgaagctcggcggtgcgtatttcagcgcgcagcgaaaactcagatggctttcgatgcggaagcattttgcgcgcgagcgcagcggggaagacttagcatatcaggcgttttcccaccatacgccgctcatgcgaaagctcaaggacgtcgacatgcagctccagcgcaacaaggtgacgaatctccgcctcgcctgtgcgcggctcgacgggcttttgctgcgccccggtgaaacgatgagctactggtatctcatcggaaagccgacggcggggaaggggtatctgcccggcatgatcctgcgcaacggcgggtatctggccgcgacgggcggcgggctctgccagctctcaaacctcatctactggatgacgctgcacacgccgctcacggtcgtcgagcgccaccgccacggctacgacgtctttcccgacgcgaaccgcacgcagccattcggcagcggtgcgacctgcttttacccctatcttgacctgatgatccgcaacgacacacaggacacctatcagatgcgcgtccgcgtcggcaaaacagaccttgagggcgagtggcgcgtgagcgccgagccgaccgagcgctatgcggtcgtagagcgcagccacgagatgcgcgcgcagtactggggcggctacatccgtcacaacgagctctaccggcagacgtttgatttgcagggcaagctgctcgcggagacgcctgtcgccgtgaacgacgcggtgatgatgtattcgccgtatctggaagaaagcaaaaaggaaggctgacaaagtcaaccttccttttatcttattcagccgtttcgtccgcctcttcgggcgtatcctcttcctcgggctcttcccacggctgcatcgtggcgacgcagcggttgatgttcttgccctcggcatagaatttggcctcgtagtcggtcatcacgccgcgctgtccgttcgcgtgcagatcgcgtgtgacctcagagagttcgaagccgaactgcgggatctcctcgatcgaccactcaaacagcgggtcgttgtcggtcttgaaatgaatttggccgttgtccttgagcaccttgcggtagagcttcaagaaattgccgtgcgtcagccggcgcttggcctgccgcttgggaggccacgggtcgcagaagttgacatagatgcggtcgacctcgccctgatcaaaaatctcagggagctggttggcgtcgatgtcgatgaagaagacgttgtgcagctctgccttcgccgcgcgctccatcgcgacgaccatcgcgtcgggcaccttttcgaccgcgatgagcagcacgtcgggctccgccgcggccgtctcgacggtgaagcggcccttgccgcagccgagctccacgcggacctccttcgcctcgggcatcaagtcgtgccagcggcccttgcgctcgtaggggtccttgatctgatacgccccgcaccgctccatgcgggggagcaggtttttctttttgcgcattcgcatagaatgaacctcgttttcctataattaaagcctatcatatcgaaaattggtgcaagagacaagtcattttaaaaattttatacaagagttgctgcattgggagaaaagatcattaaaaatgcaacgtttcttgcaatgacatcggaaaagtgtgaaacttttttgaaaaaagtgatttttctcttgcaaatatgccttgccgcccatataatagggggcagttgaagaagacaggaggagacacacgatgtcttttgtcaaatatgaacccaagggcaacattgcctatctcatcattgaccgcgaaaaggcgctcaacgcgctcaattctcaggtgctcgccgatctcgatgccgcgctcgacgcggtggacttaagcgagatccgctgcctgatcgtccgcggcgcgggcgagaagtcctttgtcgccggcgcggacatcgcgcagatgaaggagctcagcaaggaggaggccgaggccttcggcaagcagggcaacgacgtcatgcgcaagctcgaagcgttccccatcccgacgatcgcggcggtgggcggctatgccctcggcggcggctgcgagctcgcgatgagctgcgacttccgcatctgctccgataccgccgtcttcggccagcccgagacaggccttggcatcacgccgggctttggcggcacacagcgccttgcccgcctcgtcggccccggcatggccaagcagatgatctacaccgcccgcaacatcaaggcggacgaggcctaccgcatcggccttgtcaacgcggtctatccgctttctgacctctacgccgcggcggaaaagctcgccggccagatcgctggcaacgcgcccatcgcggtgcgcgcgtccaagcaggccatcaacgacggtcttcaggtcgacattgaccgcgccgtcgtgatcgaggagaaggccttcggctcctgcttccagagcgccgaccagcaggagggcatgggcgccttcctcgaaaagcgcaagcacgagccctttatcaacaagtgattccatagaattatctatttatattgtaggaggatacacacaatgaaagttgcagttttcggcgccggcaccatgggcagcggcatcgctcaggtcttcgcggccaagggccacaccgctctgatgtacgcttccagcgtcgcttccgctcagcgccacaaggataagctcgccgcttccctgcagaagcgcgtcgagaagggcaagatgaccgaagaggccaaggacgccatcctgaacaacatcctcgtcgaggagaagtctgccgcggcggacgccgacctcgtcatcgagtgtgtggcggagaacatggacaccaagcgtcagctcctcggcgagctcgacgcgatgtgcaaggagagcgccgtcttcgcgaccaacacctcttctctgtctgtcaccgagatgggtctcggcctcaagcacgccgtcatcggcatgcacttcttcaaccccgtgcccagcatgaagctcgttgaggtcatccgcggcgccaacaccacgcaggagaccttcgacttcatctacaacctctccaaggagatcggcaaggagcctgtcgaggtcgctgaggctccgggcttcgtcgtcaacaagatcctgatcccgatgatcaacgaggccatcggcctggtcgagaccggcgttgcctctgtcgaggatatcgacaaggccatgatgctcggcgcgaaccaccccatgggccccctcgccctgggcgacttcatcggccttgacgtgtgcctcgccattatgaacgtcctctacagcgagaccggcgatccgaagtatcgtcccgctctgctgctcaagaagatggtccgcggcggccagctcggcaagaagtccggcaagggcttctacgattacagcaagaagtaatccgtccctaaaaggataaaaaggagaggcagtttacaaaaactgcctccctttttctcttttggaatggaaaggattcctgaaaatgacagaaaactgtcataaaaggaacggaaatgtcaaaaagactttaatgaattcggcgaaaagcacgaattccaaaaaggaatgatagttcctcttgcgaaaataaaacgcacaggatataatgtaagtcacggaactgatttgtgaaaaattagacaatccaattatttttatagtgaaggagcaaaagactatggatttccatctgtccaaagaacatctgctggtccgcaaaatgtatcgcgaatttgcagaaaatgaagtcaagcctttagctgaggaactcgatgaggaagagcgcttccccatggagaccgtcgaaaagatggccaagctcggcatgatgggtatttacttcccgaagcagtatggcggcgccggcggcgatgttctcagttatgccatgtgcgtggaggagctcgctaaggtttgcggcaccaccgctgttatcgtttccgcccacacctccctctgctgcgctcccattttcgagaacggcaccgaggagcagaagatgaagtatctgcctgaccttctgtccggccgcaagatcggcgcgttcggtctgaccgagcccggcgccggtaccgatgcctccggccagcagaccaccgctgtcaagaacgagaacggcgactacgtcctcaacggcagcaagtgcttcatcaccaacggtaacgttgcctccactttcgtcgtgttcgccatgaccgacaagagcaagggcaaccacggtatcaccgccttcatcgttgagaaggacttccccggcttctccaccggtaagcacgagaagaagatgggtatccgcggcagctctacctgcgacctcgtcttcgaagactgcgtcgtccccaaggagaacctgctcggtaaggaaggcgaaggcttcaagatcgccatgaagaccctcgacggcggccgtatcggtatcgcctcccaggctctcggtcttgccgaaggcgccatcaacgaggctgtcaagtacaccaaggagcgtatccagtttggtcgccgcctgagccagttccagaacacccagttccagctggccgacatgcacacccgcacgcaggctgcccagtacctcgtttacgctgccgctatgaagaagcagaatcacgaggattactccatggacgctgccatggccaagctcttcgcggccgagaccgcttccgacgtcacccgccgcgctgttcagctcttcggcggctatggctacacccgtgagtatcccgttgagcgcatgatgcgcgatgccaagatcaccgagatctacgagggcacttccgaagtccagcgtatggtcgttgccaagtatcttggtgtgaactaaaaaaggaggtaaagatataatgaagattcttgtttgcgttaagcaggtccccgatacctccggtaaggttgccgtcaatcccgatggtaccctgaaccgcgcttccatgcagaccatcatcaaccccgatgatatgaacgccgttgaggccgctctcaagctcaaggatgagctgggctgcaaggtcaccgtcgtcaccatgggtcccccgccggcagaaggtatgctgcgcgagctgatggccatgggcgctgatgacggctatctcgtttctgcccgtgaattcggcggttccgatacttacgccacctcccagatccttgccgccgctctcgacaccatcggtctcgatgacgacgacatcgtcttctgcggccgtcaggctatcgatggtgataccgctcaggtcggtcctcagatcgctgagaagctgcacctgccccagatcacctacgccgccgatgtgaagaaggaaggcgacaccctgaccgtcaagcgcatgctcgaggacggctacatgaccatcaaggctcagactccgtgcctgatcacctgcatcaaggagctcaatactccgcgttacatgagcgtctccggtgtgtttgagtgctactccaagcccatgaccgttctggactacaacgccctgaaggatcaccccctcatcgacgctaccaccatcggcctcaagggctccccgaccaacatcctgacctccttcacgcctccccagaagggcgccggtcagatgctcgagggcaacgacatggctacctgcgagaagctcgccggtatcctgctcgaaaaacacatcatttaaggaaaggagatcaatacgatgcgtaacgaagtgaaacttgctaatcccaactatgactcctccaagatcgaagagttcaagaacgtatgggtcttctgcgaacagcgtcagggccagatgatgtccacctcctatgagctgatctccgaaggccgcaagctggcggacgagctgggcgtgaagctctgcggtctgctggtcggcgacaatgtcggcgatctcgccgagagcattggcggctacggcgctgatgaggtcatcgtctgcgaccaccccctgctcaagaactacaccaccgacgcttattccaaggtcatctgcgacgtcatctccgagatgaagcccgaggccttcctcatcggcgcgaccaacatcggccgtgacctcggcccccgctgcgcagcccgtctgcacaccggtctctgcgccgactgcacccacctcgacgttgacatgcccatctacaaggacttcctgcgcggcgcttccacgctgcccgaggccaagatcgacggcatggccaccgcgaaggtcatgggtaaggaccacgatgtctctcgcgacctgaagatgacccgtcccgcgttcggcggcaacctgatggctaccatcatctgcccgcgcttccgtccctccatggcgacggtccgtcccggcgttatgaagaaggctgcttacgacgaggcgaaggccaaggccgttaagatcaccaagtacgacgtcaagctcgacgccgccgatctccagaccgaggtcgtcgaggtcgtcaaggctgccaagaagctcgtcgacctggttggcgctgactacatcgtctccgtcggccgtggtatctccaaggacgtcgagggcggcatcaagctcgctcacgagctcgccgatgtgctcggcggcgttgttggcggctcccgtgttgccatcgactccggctggctcactgccgaccatcaggtcggtcagaccggtaagaccgtccacccgaaggtctacgttgctcttggtatctccggctccatccagcacaaggccggtatgagcgagtccgagtgcatcatcgcggtcaacaagaacgacaccgcgccgatcttcgagatcgccgactacggcatctgcggcgacctgttcaaggtcaccccgatg

SEQ ID NO: 100 - DNA, 19778 bp, unidentified
  source 1..19778: mol_type = unassigned DNA
atgaaagtagtaattctggccggcggccttggcacgcgcatcagcgaagaaagcgtctacaagcccaagccgatgatcgaaatcggcaacatgcccatcctgtggcatatcatgaaggaatattcctactacggctttcacgattttgtcatctgcgcgggctacaagcagcacatgatcaaggagtggttcgcggattacttcctgcataccagcgatattacgtttgatttcacccgcggccagaacgagatgatcgtccacaaccatcacaccgagccgtggaaggtcaccgttgtggacaccggcctcaacacgatgaccggcgggcgcatcaaacgcattcgtccctacatcggcaatgagaccttcatgatgacctacggcgacggcgtctgcgatgtggacattgccaagctggtggcattccaccgcgagaacggcaagatcgccacgctgaccgccgttcagcaggagcagcagaagggtgttctggatattgccgaggataattctgtccgttctttccgtgaaaagaaggccagcgacggcgcgcttatcaacgcgggctatatggtgctggaaccgcagattttcgactatctggacggcgacgcctgcgtctttgagcagaagccgctgcagaagctggccgaggagggtcagctgatgagctatatccacaagggcttctggcagtgcatggacaccgcccgcgagaagcaggtcctggagaaaatgcttgccaccggcaacgcgccctggaagaagtgggaggattgatgatggtacattacgatcctgaattttaccgcggcaagcgggtgttcgtcaccggtcacaccggcttcaagggcagctggctctgcaagatgctgctgatggccggggccgaggtcacgggctacagcctgcagccgccgacgcagccgaaccttttctccatcgccggcgtcgagggcaagatgcacagcatcatcggcgacatccgcgactttgacgcgctgaaggccgcttttgacgcggcgcagcccgacattgtactgcacctggccgcgcagcccatcgtgcgcgacagctacaaggacccgcgctacacctatgagacgaacgttatgggtacggtcaacctgctggaatgcgtgcggctggcccggcagcagggcagagcgccccgctcggtgctgaacgtcaccaccgacaaggtctaccacaacaacgagtgggcctggggctaccgcgagaacgagccgctggacggctttgacccctactccaacagcaagagctgctcggagttggcgacgcactcctacatcaacagcttttttgccgataagaccgtggccgtctcgacggcccgcgcgggcaatgtcatcggcggcggcgactttgccaatgaccgcatcatccccgactgcgtccgcgccatggccgcgggccgtaagatcggcgtgcgcaacccctactcgacccgcccgtaccagcatgtgctggagccgctggcggcctacctactgatcgcccagcgccagtacgaggacagccgctttgcgggctactataacgtaggccccgacgactgcgactgcgtcaccaccggcacgctggtggatctgttctgccgggcctggggcggcgacgccgcctgggagaatcaggccgaggccaatgccccgcacgaggctaacttcctgaagctggactgcagcaagctgaaaacgaccttcggctggacgccgcgctggcacatggccgagtgcatggaaaagaccgtcgccttcagcaagatctggcttgccaacggcgatgtcccggcggagatggaaaaggaaattaacagcttcttggaggggcagaaatgacaaaggaacagaggagtataacaagcgcttttgtcatttcggttttggtaggtggagcctatctggtttcctggctggcgcatgtatggggtggtcagccgtggcccatcggcagcaacatggtcaactatgccgtagttctagtactgttcggcgtttcgcttttgctgttcggcaacctttttgcccgcattctgccgcaagaacgtggctttgtgcgggcctgcgacgcgcgtctgcagggtcgcggcgcggcagcggcccttgtggtatctgcgctggtgacagccgcctaccttatttattacgcgaacattggggtgtccaaggaatttgcggggccttcctattcgccgtcctccctgatggcgccgcagatggtgccgctgtattacctgcttacggtgctgttttttgtggcggcaatctatctgctgctgacgggtaaggactgcccgcagtggatgacctggggcggctacggcctttcggcagtgatgtacttcttgggcgtatggatcgtcaatacgtttgagggagacccgtaccacggtgaggcgtatttggaaagcatctacaacgtggctgacagcatcccctatgaggagttgacgacaggcatctacggccactacggactgttctttctgctgccgatgaagatcttcggtgcaaaggctgtcgttattcaattcctgatcgcgctggtcggcgttgtgacggatctggccatgctgtactgcatccatcacctgataaaaaagaactgggtacgcctgttgatggcactggttgtgccggtcattccgtttgcatacagacggacgaattactggcagctgcagcctcaccgtttggtattcccgatgttgctggcggcctatatgctgttctgtttgcggaaaaagcagtcgaaaaaaacggctcggttctggggcggctggcttctgtgcatgctggcagtgctgtggagcaccgagagtggtctgttctgtatcatcggctggtgcgcgggctgcatcgtccgctggtggcagcaggagccatggtacgcccgcggccagtgggaacgctatggtgcgctgctgctgggcgctgtgttggcggtgctgggggccattggcctgacaaatttgtataacctggcctgcggcggagcaccgatcttcaaggtgtttttttacccgctgtacagcagcaattatatggatggttccatcggctacccgcttgagctaggcgtgcgcccatgggtgtttgtgctgctgcttatgctggccgtgctggcatggtcgctgttccagacaaccgctatcggaagaatagccaaaacggagaacattgccccatttgcggcctgcctgtcggtgctggggctggtatcgttcagctactatgcaaaccgttctgcctggatgaatctggagatctgcctgccggaggcactgctctgcctgtgcttcccgctgcaggcgctgacggacggggaggggctacgcaagaagctgggcggcctgtactgcacggcggcacagtctgtgggactggccgtgctgctggtgctctgcgtgcttacggcacagctgcccggcggcgtgataaatacagtgatcctgcaggagcgcggtgcgttcagcacacgcggcatctatgcggaggtggagaatttctctgccaatataccggacaacacctttgcggttggccgcgatgtggggatcatctaccatgcagcaggctgggacaactacggacattatgtggatgctgcggattacggcgtggcagataccgaaaaattactccctcatattctggcagagttgaaggcccagccgagctttgtcgtggatgacatactgggggtctatctggggcagaatggctacacgcccgacatgctcggataccagctgcagacgaccttcacatcggctggcggcacgaacccaattacctattactactacgaaaagcaataaaaaaggagagcaaaacctatggcatggaagaacgaggcagaagcccgcgagcagatcaaggcgatggtcgccgagtattatcacgacttcaaggagaaaaagaccccctatcaggagggtgatcgcatcacctacgcagcccgcgtctttgacgagaaggagatgtgcgctctgaccgatgccacgctggacttctggctgacgacgggccgctttgccgaccagttcgaaaaggaatttgccaagtggatcggcgttaagttcgcccatctggtcaacagcggttcctccgccaacctgatcgccttcatggcgctgaccgcccccgagctaggtgaccgccagatcaggaagggcgacgagatcatcaccgtggcctgcggcttccccaccaccgtgaccccggccatccagtacggcgcggtgcccgtgtttgtggatgtgaccgtgccccagtacaacatcgacgtcaccaagctcgaggccgccctctcccccaagacgaaggctgtcatgatcgcccacacactgggcaatccgtttgacctgtccgccgtcaaggcgttctgtgacgcccacaacctgtggctggtcgaggacaactgcgacgcgctgggcacccagtacaccatcaacggcgagacccgctttaccggtacctggggcgacatcggcacgtccagcttctacccgccgcaccacatgacaatgggcgagggcggctgcgtttacaccaacaacccgctgctgaaccgcctgatcctctccttccgcgactggggccgcgactgcatctgcccctccggccaggataacttctgcggccaccgctttgacggtcagttcggcgagctgcccaagggctacgaccacaagtacgtctacagccactttggctataacctcaaggtcaccgatatgcaggccgccatcggctgcgagcagctgaagaagttccccaccttcatcgagcgccgccgccacaactgggaccgtctgcgcgccgcgctggaacccgccgccgacaagctgatcctgccggagccggctgccaacagccgcccgtcctggttcggcttcctgatctctgtcaagccggagagcggtctggaccgcaacgccgtgacccgctatgtggagagccacaacgtgcagacccgtctgctgttcagcggcaacctcatcaagcacccctgctttgaccagatccgcggcaccgacgcctaccgcgtggcgggcgagctgaccaacaccgactttatcatgaacaacaccttctgggtcggcgtttaccccggcatgaccgacgagatgatcgactacatggccaagacgattatcgaggctgtgaatcagtaaaattttgacaacgaggtacagacccctatgatgcagcaaaaggtgaaaacgacccgcgcacccagactgcggttggacaaaaacaggcggctgacgcctatgcagatctactgctgggcaacggtggcctgtctggcggtgctgctgcttgccctgctggccagccgcggtacgctgctgcatcgattcttcttttatgatgtcaccgataccggtatggactttttccatagtattgagtatatgcgtggacgtatgccctacggacagttcgatacgctgtacccgccgcttgcaaatttgtttttctatgtgttgtatttgcttgtgccaaagacacaatcagctacgtggacggaatcgtttatctcgtctctcaacatgaagggaacagaacgggatttgcgtttgcagcaagcgacgatgatgctgtttatcgtctttgttatcgtggtggtcttaggaattgtatcgatgacagaacgcctgacgcgcagctgcggggggcggaaaaagctgctggcattctgtgcagtgttcagctatggggtactgtacggcttggaacgcggcaatattctgctgctgtgctggccgttaatggcattttttatcctgtaccgcaattcagaaaaaccacttttgcgggagttggcctgtctggcactggcgattgccgccggtttcaagctgtacccggcgtttctgggcgtgctgctgctgcgcgataaaaactatctggccgcggtgcgcacggtgctgtacggtgttgtctgcctgtgcttcccgctgttcttcttcaatgaaggattgtttggcctcacactgtggttccgtgtactgtttgattttagcggcagcagagatgaaccgtggatcggcaacggtttctccaacattttggcagaggccggacatgcggtggacaagctgctgggcacgcagctgggctatggcagctacgcactgctgggcattgtgctggcagcggtgctgctggtgtgcagcttttttatggataaggagtggaaacgcatcacagcaatcattctggcgatgctgatgttccagtcccagtatgattatgtatggtgcctgtttttgattccgctgttcctgtttatggagcaggagcgtgagctgcgcagtgacaacgtgctgccctatctggccttgatggtgccggtgctgccgctgccgctgtttcggcgggaccagatggagccgtcctttgtaccgcgcaacacgatttgtcatgtcatgctgctgctgctcattgtctggtgctttgtccaggcagtgcagggggtgcgtgtacgctgtgcggaaaaaccggtcaagccggcacacggacacccggcagccacggtgctgctggccgtttgtgtggcggtggccggtgtgggcggccagcagctgtggcagcgcacccacaactggggctttgactacggctataacggccgactggatgccgaggacatccggcagaaggacgtgcaggacagcgacggcaacccggtagaggcaacatggagcggccgcggtgcgtatattatgatttacaaccacgcgccatttacgcaaaggatgacggtcacgttccagacaggctacggcatggatttgaagcgcgcctatacgatgacgtttgaagcaccgaatctggaagatgctgatggtacaaccgggaagcagaagcagacgaatattaagattgaccatgaggggcagaccgtgcgctacacggtagatgtggcccccggccagacccaaattgatgtgagctatgacggcccgatggcggtctatgatgcttcttcgcgcaaaaacggtaccttcacggtgacaaacctggcggtcaccagtgagggcgctgtggaggaaaccgaataacggaaggaaacatatactatgcagaaattgctggccctgctgggcgcaaaaaataaagaggaatttgtggagctgttcaagcagttcatcaagttcggcctggtgggcgtaagcaacacggctgtgtccatggcggtctactatatcttcctgtggatcagcccggacctgtatatggtcggcagcattctgggcacgattctgagcattgccaacgcctttttctggaatgataaatttgtctttaccggcaacgccaatgactggcgcagcaagctcaagcggctgggtaagacctatgtcagttacggcggcacgtcgattttgtccaatgttctgctctggatcgaagttgcattcttcagtgtcagcaagtccattgcgcccatcgttaatctgttagtgacgatcccgctgaactttgttatcaacaagctgtggacatttaaggaaaagtgagaacaagcacgatgcaattagtaatggaaaaaccacatacgaataagcgccagaacgcgcgaggctgggtattggctgcactgctttgtgtggtgattctggcctattcctcaatttatttcgccaacacgatgcccattacggaaggctagaatgtaaactatgcagagctggtattgcacgggaaatttccataccgcgatttttactattacctgccgccactgaacatcctgattgatgtgctgctctggaagctgtcgtttggcagcctgttcatttaccgtgcgtggtggctggtacagcggattgctatttatgagttgatgtttcggctgctctgccggtatttcaatagatatgccgcctttgcagcgtgtgccttctctgcgattctgtgcacggcctctgtctacgatttatttggtgattataaccagacgattccgtttttgtctgtgttgctgctctattgtgttctgggatttgcagaggcggtagataagaaagccgccgggaaatacctgtttgctgccggcgctatgctggggctgctctttctgaacaagcagacgatttttgcagctgcgggggttatttatctgctggctttgagtgtctactgctggaagaaaaaagacaaaggctttctgcaatattgtgcggcggtcatacttggctttttgctggtgttcgtcgtggccatgggaatccttgccgtcaatggcgcgttgcttccgttctttcagcaggtctttatgcacacgggaggcaaaggcagtccgcttgtcattttgctgaaaatctttacgggctggacaatcaatgcgccggtatttttactgatggtggggtgtgtagctgccataacactggcgcagaaaaacgagagtcagacagcaggacggatgctcttgctgctggtcataggcggcggctatgttttggaaaggcaggctgcgaacgactttatcgaagtgctcgttggtacgaaaagcgtccaagccgttgtcatcggtggagggttgctactgttgctggcgtacagccaaaagcgcagaagcggcagcaagataatgcatgatgtattttacggtctgtgtgccgcctatgtggtgactattctggttacggcccgttatgcgtcattaggcgaagataacgggagcttattggaagcaatctatgaatcaggcacgctgtttaagagtgtgactggtacgctgtatacgatcatcagctttttggatctatatctgattgcccgctcccttatgaaaataaaagcggatggcaatgacggctatgcacgtgagcacttttggatggcctgtgcggcattttctacgatatatgcagccagtatggcatcggcatcagaaatttcctaccatgggatcatgttggctatgccgtttgttctgtgtgttgggctgaacagcgtatttacagataaagttacggaaaaatctgtcaaaatcggtacgattgcgctgtgcacagtactttcgatggcttgtattgcacagaaggtcgtatgttcctattcttggtggggctgtgaacaggcagagtatgacaaaaaaatctacgccaccggcatccccgcgctgcgaggcttccgtttttctgcggaggacgacaagatgttggaagacatcacacagctgattcttgaaaacacaacagaagatgcaacgatttttggctatccctatgtaaagctctttaatattctgacaaaccgctatacaatggatacgtttgttccggttctgttctatgacgtggtagacgaccagtacgttttgcaggaggacgagctgctacaggaaaatctgcctgacattgtaatctggaaggatgatgttccaaactgcaagaaggttcacgaagaaagttaccgcaatggtgagaaattgaagcagcgcgagctggaaaagaattttggacgactgctgggcacacgctacaccctgttgggcgtgtatggtgaggaaagaaccggtaagatcaaggtgtacaagctggcagacgagacagactggggtagcttcaccttggaaggaaagggaaccgaggaagagccgtatctgattcagtcggcggaggatttgcaggcgttcagcaattatgtcaaccgcggcatgagctttgcagatcagtatgttgaacagaccgctgacattgatatggacggtaaaaaatttacgcccattggtgcattcagcggggaaagctatttttacggcacctacaatggcaagggacatattatccgcaatctgagcattcagggcaaggctacagaggatgtcggtctgtttggacgtctcgaaggggctgtttacaatctggggcttgaagtgggcagcctgactggcgactgtgttggagcaattgccagctatgcagtcaacccggaggcagagattgtgaactgctttacggatgtgaatgtcacgggctcgcgcgctggtggcattaccgataacttcgctggtagtgttgtaaactgtgttagtgccggtgcgctgactggtggcgaaaacgcggatgcaatcgcctataatagctcaattatggtagagaatgtttatcagctgacgggtcaaaagacaagcctgcttgatagacccgctattcaagaaaagcgtgtcagctatgccgacgaagatgttttcaacagtgatttcctggtgaagcgtctgaatgccgcagtaagagaaaagaataaagcaaacagcgagagcggcgcagaagaagcgattacgcttgtcgaatggacaaagggaacggacggccacccggtattggttcctgaaaattgactgaatggaaaaggagcaacccaatgaaacagcgtttagcggattatgtggcggactttctggcggcgcgcggtgtgacggatgttttctccgtcgtgggcggcggcgctatgcacctgaacgatgcgctgggccataacccccggctgcatgtgacctacaaccaccatgagcaggcctgcgccattgcggcggaagcctacgcccggctggaaaataagatcgcggcggtctgcgtgaccaccggccccggcggcaccaacgcgctgaccggcgtcgtgggcggctggctggactccatccccatgttcatcgtctccggccaggtgcgctatgacaccacggcccggtacgccttgcagtacaccggcacgccgctgcgcgccatgggcgaccaggagtacgacatcaccaagtccgtccagtacatgacgaagttcgccgccatgctggaggaccccaaggacattcgctacctgctggaaaaggcgtggcatctggctacaacgggccgccccggcccggtctggctggacatcccggtcaacttccagggcggctacatcgagactgacgagctgcgcggctacgaccccgccgaggatgacgcccagctgcccccgtcggtggacgacaccacgatccggacgattctggaaaaaatcaagaacgccaaacggccagtgttccacgcgggctatggcatccgcctgtccggcgggtatgcggcgttccgctccgtggcggaaaagctcaacatccccatcgtcacctactggaacgccgtggacctcatcgaggatgacaatccgctgtactgcgggcgcgccggcaacatgggtgaccgcccgggcaactgggctatccaaaacgcagacttgattctggccgtaggcacgcgcatttctattcgccaggtcggctacaactggaagacctgggcccgcgcggcagaggtcatcatggtggacattgaccaggccgagctgaaaaagccgaccctgcacgtcgaaatgccggtctgggccgacgcgaaggactttttgaccaagctggataaggctgccgcggcccccgtgaacgcgggcggcgagtggctggccacctgccagcgctggaaacgcgactaccccgccgtgttgccccgccagtgggaggaaaacggcgagaccgccaacgtctacgcctttgtgcgctatttaagcagtcgcctgccggagaacagcctgaccgcggtctccaacggtgcgtgctgtgtcgtcggtaaccaggcgtatgtcatccagaagggcagccggatggcaaacaacagcgccattgccagcatgggctacggtctgcccgcagccattggcacctgcatcggcggcggacgccgcccgacgatctgcctcgagggcgacggctccatcatgatgaacctgcaggaactgcagaccattctgacgaacaagctgccgatcaaaatcttcctcatcaacaacaacggttaccactctatccgcctgacgcagaataaccttttcaaggagcactgcaaggtcggcatcggccccgagagcggcgacctgtccttcccggagtttgaaaagattgcaaaggcgtttggctacccctactacagcgcccacagcaacgccgagatgaagcaggccgtggacacggtgctggcactggacggcccggctttctgcgagattttcaccgacacgaaacaggtctgggagcccaagagcagcaccaagcgcctgcccgacggcacgctggtcagccccccgttggaggacctggcccccttcctgccgcgtgaggagctggaaaagcagatgttcatcccgctgatgccggaagtgtaagggagtgcgtgattcaaaaatggcaagcattcaaagacaaatccacaccgccatcatcaccggccctacgggggcaatcgggatggcgctgtgtgcaaagctgctggcggagggtgtgacggtttacgcggtcacccacccgggcagcgcgcgggcggcgctgctgccgcaggacgcgcggctgcatgtggtgccctgcgatgcggcggagttggccgcgctgccggagctgatcccggaaaaggccgatgcgttcttccactttgcgtggacgcacacgatcggcccgggccgcaacgacatgccggcgcagatcgagaacatccgctacaccattgcggcctgccgcgccgcggcgcagctgggttgccaggtctttatcggagccggcagccaggccgaatatggccgcgtggagggcgtgctgaccgcgcagaccccctgcttcccggaaaacggctacggcatggccaagctgtgcgccggccagatgagccgcgtcgagtgccagaggctgggcgtggcccacatctggacgcgcattttgagcgtctacggcccgcacgacggtccggccacgatgatcagcggaaccatccgtaagctgctgcacggcgagaagcccgctttgaccgcgggcatccagcagtgggactacctgtacgccgccgacgcggcagctgcgttctacgcgctggccgtcagcggacaggacggcagagtctacccgctgggcagcggcacggcctgcccgctgaaggactacatcgagacgctgcgcaacgccatcgacccggcgctgccgctgggcttgggggaggtcccctacggcccgctgcaggtcatgcacctgcaggcggacacgtcggccttacaggaggacaccggctggcggcccgcgaccccgtttgaagaaggaatccgcgaaaccattgagtgggtaaggaaagagacaaaatgagtgagaaaaagacgatttcggtaatgatcccctgctacaacgaggagcagaacgcccgccccatctatgaggctgtgcgcgatgagctggtcaagagctgcccgaactacgactatgagattttgttcatcgacaataagagcgaggacggaacccgtgccatcatccggcagatctgcgccgaggacaagcacgtcaaggccatcttcaacgtcaagaacttcggccagttcaatagcccgtactacggcatgatccacacctccggcgattgcacgatcacgatgtgcgccgacttccaggaccctgtggagatgatccccaggtttgtggccgagtgggaaaagggctacaaaatcgtcattggccgcaagacccagagcaaggaaaacccggtcatgtactggctgcgcggctgctactacaaactcatcaagaagatgagcagctgcgagcagatcgagcagttcaccggctttggcctgtacgacaagagctttatccagacgctgcgcaacctgaaggacccgacgcccttcatccgcggcattgtggccgagctgggccccgagcgcaaggaaatcgagtacacccaaccccagcgccgcgcgggcaagacccacaacaactggtacagcctgtacgacgccgctatgctgagctttaccagctacaccaaggccggtatgcgcattgcaacgttcgcgggcttcctggtggcggggctgagctttctggtcggcctgttctatctgattgccaagctgctgttctggcagagcttccgcgccaggtacgcgccgacgatgatcgccatcttctttatgggcggtattcagctggcgttcctgggctttttgggtgagtacgtcatggctatgaacactcgcatcatgaaccgcccgctcgttgtggaggaagaacgcctcaactttgggccggacgaccaatgaccggcatgaagcaggagcttgggtatttcctgaaaaacgcgaaattccgcgcggcgctggggatgaccctgctgctcagctacggctatgccatcgccacgacacgggtcagcattgactcgctggaaggggaccgctacatcggcacgggcggcgtcatgctgtccaccggacggttcggcatgaacctctgggccgcggtgctgggctacggcagggccgagccgagctatgcctttggcattgacctgctggcggcgctgctgctggcgctggcggcggtgagcttctgtgcgctgctgcgcaaggccgcgcaggaccgcatcagcatgttcggttatgggctgtttgcctgcctgtttgtctcctacccgctgatgaacgaaatttgggagtacagcggcgcgaatgtctgcgtctgcggcggctatttgctggacgccgctgcgctgaacctgctgtgggacgcgcgccagcccggcgtgccgtggcgtggcagggctctgcgcatgggcgcggcggcgctctgcctgatggtggtctgctcgtcctatgagtcactggcggcggtgtatgtgctggctgtctttgcgcttttaacgctggagcagctgctggccgtcgagcgctcgcggcttgtggaagtcctgaccgagggactgtggtacgcggcggcgctggtcggcgggctctgcctgcgcgtgctggtgacgtctggcatccatcttgtgctgccgcaggctgcggccaacggcgccaccgaaattttgtgggcgttctacccatttgtctatcttgcaaagctgcttgtcaagggcattctgattaactacgcactgcgcggctgtttctacctgcccattgctgaattggcggtggcggtgccggtgtttgtcgctctggtcatcgtgctggcggtgcgcaaaaagcggcccctgctgctgctcaccggcgcggggacgctgttctcactggtgctgctgtcgtttgtgcaggggcgttactcgccctaccgcacctgccaggtgtttgcgctgtttgtggcactggtggtgctggccgtgtatgagctgctgcgccgcgctgcggcccggcgggctgtgctgctgggcagcgtgcagctgctggcggtgctgctctgtctgcaccaggccatgtacctgaaccatctgctggccgtcgattaccagcgttccgaacaggaggccgctgtggtgcgcactctgggcaccgagcttgtgcgcgactacggcaccgacaagcccgtggtgctggtgggccgttacacgctgggggagaatatcacccggtacacgacggctgacccgatgcagcacccgctgtaccgcttcttccgcgagcacacgagctgggagagcggcgacaccgtcaagtacgtcgagaccaactgcaactcggtgctgaactggtcggtcacggccttctccgaggtggacgacgtctacggccaggcagcggagcacctgttccgctactatggctttgctttggacatgacccacagcgctgccctgcatgagcaggcgcagacctacgccgacgcccacgacctgccgggatacccccgggcgggggcgattgtcgattgcggggactatgtgctggtaaatctgcaataagaataccgcggaaaagtttgcgcttctccgcggtttttgctttctttctgtattttaccgatgttttcagccggtcacggtctcaaagggcttcgtcaggtgcccgttcctgtcggcctcgcaggcgcagcgggcctacttcaaatactccaccaaaaacgccactgtcgtctcccgcagcactttgtccagcgcggcggcggtggcggcgtcctcggatagatagttgtggttcccctcggcaaacggctccagcacgaccctgccgtcgggcaggctctcgacggcggctatcgtctcggcctgggtcgtgtcgctcaaaatgccctcttggccggtgtaggtcaaaagtgtcggcagggcgctctcccgcagggcggcgttcgggtcggaatcgcgcatctcggtgaacagcgttccgctgacatcgacgccccaggtgctgatgctgccgctcgcctcggcctcagcggccagcgcttccacggcggaaaagtcgtcgatgttcaaaaattccatgccgcgcaggcccgcgccgttggcggggctccacagcgccagcgccgtgatgccgcccctgcgctgcgggtagaggctggccagccgtccgcccatgctgtggcccaccagcgctgtgcggcccgtgccgtaggtctgctgcatgtaggtgatggcgctctcgacgtcgtcggtcatgttggacagcgtgtaggccgggaacggctcggtgctgttgccgcagccgggaaaatccagccgcaccgtcgcaatgccctgggcggccagatcgtcggccagcggcgcaaagtggccgtcgccgctgcggctgccggtaaagccgtggcagagcacgacgagcggcagctcctccccgcgggccagcttgccgggcagctgtaccgtggcgtaaatgtccccgcgcgtgccgggtatggtgacgtcctgcgctttcggtgcgggcgtcagcagaaaaagcgatgccgccacgcagagcgccagtgcggcaatgcagcctgcaagggtataaaaagcgcgtttatgcgtttgtttgtgcatagaattacctccgtaatgcctctattaaagcctatgcggggcaaaaagtcaagacgcacagaatacacacaaaaaaacaggtgacaaacccggggcggatgtggtatactaaagattacaaattggttaaaaagtcagacccggggcgcaggcgcagccttgccccggcttttgtcctgttttaccggaggtgcttgactacgaattctatagcgaaccgtatgccccgcctgctggctatgctgtttgtgctgctggggctgttctgcgcggcggcactgcctgcccatgcggaggactacgacacggtgctggaccgcctgtcccgcctgcaggcgctggcgcgggagtactcggccagtcaggccgacacgcccgacccgatcgagctgacgctggcctacacccgcacgggggagtacaactccacgatctggcagctgaccgccggtgtgcgcgacgccgggtttgagagctgcgtcaacagcagtgaccccgagttggcgtcgctgcagaatatgaacaccgtcgtcctgcccaacggagagagcatcgactttgggcacctgctggcgtcgatgaaccttgtctacaacggcatacccatcacgggcagctggggcggcgactgtgaggagctggccaggcagtattacggccaggccggcgatgccgcgggctacgccgaggcgatgcgcgcttcctttaataaagacgatgacggcacgctgagccgcttcagcaacggggacctgcgggcggacctcgactccgtcgtcgtcggctccaaggtgacaaaggacaccgacctggccgaggcgctgcgcagctactacgcgaatctgaccgagtatgaccgcgttaaagagttcatctcgctgagcttcggcacggtggatacatcgagcacggcctttgcggacgccgtgtacagcgctctgctggaggattccggtatgcagctgctgttctacatgaacggtatgtggaccgtcaagggctggcagatcaaggacgactacgcccccgccgtgcgcggcgcaacagacctgtttgccgagtacctggccaacgcggtcaatcacgagaagatcaagagcgagacgaatgaccgtctggttgccatgggcgggcaggcactggccgacgcgctggaggcgttgggcgacaccgacgccgcccaggccgcactgaccgccgccgaggagatggccaataacgcccaatcgacggtttcctccggttcggatgtggtctccgccgcgcgggagaatttgcagacaaattttaacgtgaaggtcttccagctgattttgctgattgcggcggggctggcagcgttcatgctggtgttcagcatggtgatgtttgtggtgcaccgaaaagaaaattgagtttggactgcgtgccgctctcttgtgggaaagagagcggcacgcttttttggttgggcgcggggcaggcgggcaggccgctttttctgttcacaccccgttcacattccgtatattcaccccgagttatccacggcgtataacggttatccaccgtggaaatgttgaaaactccgtggaaagcgtggaaaactctgccgcccggacccgttcaaaagcggaaaaccgggaaaatctacgtagaaaaaacgtttattttccacattttccacagcagcgctgttgaaaactgtgaaaagccggtgaaaacgcgaattgcactttttgcaacacaaaatacacattttgtaaataagggcttgcgctcgccgcgcgacagcgctataataaacctaaccatcacccgcactgctgtgcggcggtgcgcttgaatataaaagggagagtgcgaaattatgttggacattaaaatcaccaaaacgacccatccgaaggaaaagccgcaggacgagtcgaagctcggcttcggcaagcagttcagcgaccacatgttcctgatggactataccgcgggcgagggctggcatgacgcccgcatcgtcccctatggcccgtgggagatggacccggctaccaccgtgttccactacgcacaggaaatttttgagggcatgaaggcctaccgcaccgctgacggcaagatccagctgttccgccccgactgcaacgcgaaccgttttaatgattccgcggaccgtctcggcatgccccccatcccgccagaggacttcgtgcaggctgtcaaggcgctggtcgatgtggaccgcgactgggtgccccactccgacggtgcgtccctgtacatccgcccgttctgcatcgctaccgatgtgggcctgggcgttcatgccgccaagcattaccgctttgccatcatctgcgcgccctccggtgcctactacgccgagggcctcgaccccgtccgcatctatgttgaggatgagtacatccgcgccgccccgggcctgaccggctttacgaagtgcggcggcaactacgccgcgtccatcaaggccggcgagctggccgaggagcgcggcttctcccaggtgctgtggctggacggcgttgagaagaagtacgtcgaggaagtcggctccatgaacatcatgttcaagatcgacggcgagatctacaccgccccctgcgtgggcaccgttctgcccggcgtcacccgccgctccatcatcgagctgctgaaggactggggctacaaggtgcatgaggagcgtgttgccattgccgacatcatgaaggctgccgacgagggcaagctggaggaagtctttggcaccggcacggctgccgttgtctcccctgtcaaggagctggattgggagggcaaggttgcccacatcagcggcggccacatcggcgaactgacccagaagctgtatgacacgctgaccggcatccagtggggcaagctgcccgacaccaagggctggatcgttcctgtggaataa

SEQ ID NO: 101 - DNA, 10990 bp, unidentified
  source 1..10990: mol_type = unassigned DNA
ttggagaatcagtatgcgatcgaaatgctgaacatcaccaaaaaattccccggtattatcgccaatgacaacatcaccttacagctcaaaaagggcgagatccacgccctgctcggtgaaaacggcgcgggaaaatcgaccttaatgtcggttctcttcggcctttatcagtcggaggagggcatcatcaaaaaggacggcaaggtcgtgtccatcaaggacccgaacgacgccaccgcgctcggcatcggcatggtgcaccagcatttcaagctggtggacgtgttcaccgtgctcgacaacatcatcctcggcgcggagacgacgaagtgcggctttttgcagaagaaggaggcgcgcaaaaaggtcgaagagatctcgaagcgctacggcctgaacgtcgaccttgacgccaaggtcgaggatatcacggtcggcatgcagcagcgcgtcgaaattctgaagatgctgtatcgcgacaacgagatcctcatcttcgacgagccgaccgcggtgctcactccgcaggagatcgaagagctgatggccacgatgaaggagtttgcccgcgaaggcaaatccatcctcttcatctcccacaagctcaacgagatcatggaggtctccgaccgcgtgagcgtcctgcgcaagggtaagtacatcggcacggtcaacacgagcgagaccaccaagcaggagctttccaacatgatggtcggccgccccgtgcagctcgaggtcacgaaggacgaggccaagcctgcgggcgaggttttgaaggtcgaccacctctgcgtccattcccacgtgcagaagcgcaacgccgtgaacgacgtttcgttcaccgtccgcgcgggcgagatcgtctgcatcgccggtatcgacggcaatggtcagacggagcttgtctatggcctgacaggccttgacaagccgtcctccggcacgatcaccctctgcggcaaggatatctctcatgcctccatccgccaccgcggcgagcacatgagccacattcccgaagaccgccacaagcacggcctcgtgctcgacttcacactcgagcagaatatggtgctccagcgcttcaacgagccgcgctttgaaaaccacggctttatcaacaacaaggctgtgcgcgactatgccaactacctgatcgacaagttcgacgtgcgcagcggccagggcgcgattacgcgcgcgcgttccatgtccggcggcaaccagcagaaggccatcatcgctcgcgaggtcgaccgcgacaaggacctcatcgtcgccgtgcagcccacgcgcggccttgacgtcggcgccatcgaattcatccacagccagctcgtcgccgagcgcgaccgcggcaaggcgattttgctcgtctcgctcgagctggacgaggtcatgagcctctctgaccgcatcctcgtcatgtacgagggtgagatcgtcggcgagctcgacccgaagaaaaccaccgtcgaagagctcggcctttacatggccggcgccaagcgcatggcgaaggaggaggcggccgtatgaaaaaagaacacttcctgcaaagcgaaggctttaagaccgtcgcagcgtccgtcctctcgatcctgatcggcctcgccgtcggcagcatcgtcattttgatcgtcggtctcacgagcccgaacctctcgctctcctcggcgtgggacggcatccgcatcgtgttcggcggcctgttctccacgggacgcgacgcctccggcacgctgacgtggggtttcaacccgacgaatatcggcaacatgctcttccgtgccgcgccgctcatcatgacgggcctttccgtcggcatggcgtataaaacaggccttttcaacatcggcgcgccgggccagtatctcatcggtacgctcgtgtcgctctccatcgccctcggtcttccgtccgagacgatgtccaccacgctcatctggctgctcgccttcctcggcggcacgctcgcgggcgcgatctggggcgcgatccccggccttttcaaggccctgctcaacatcaacgaggtgctcgcctgcatcatgacgaactggatcgcggcgaacctcgtcacgtggctctttgatatcagcaactttaagaacgtcaccgagtccaccaagaccggctacatctacaagacgacctacaatggcgtcgccaccgcaaagatgggccttgacaagctcttcccgaactcccaggtcaacggcggcatcctcatcgccatcgtctttgcaatcgccgtttacgtgatgatgtccaagacgacgttcggctatcagctcaaagcctgcggctccaaccgtcatgccgcgcgctacgccggtatcgccgacaagcgtaacatcgtcatctccatggcgatcgcgggcggactgagcgcggcgggcgcttcgctctactatctctccggcaacacagagttcttctggtccacgtaccagtcgctccctgccatcggcttcaacggcatccctgttgcgatgctcgcctcctgtaaccccatcggcatcatcttcacggcgctgttcatgtcgatgctcgatatctcgggcctgcagctgacgaacctgacggcctataacgagtacatcacgaacgtcatcatcgccgtcatcgtgtatctgagcgctttctcgctggtcatcaagatgtggatcggcaagctcggcaaaaagaaggacgacggcgcggatgccaacgcggagcccgccccggcggcagcttccgcaccagccggtgcacaagcggaaacggagaaaggaggcgacgcgaaatgacattcctcattcagcagacgctcatttatgccgtccctctgatgatcgtggcgcttgcgggcgtgttcgccgagcgcagcggtatcatcaacctggcgctcgaaggtatcatggtcttcggcgcgttcatcggcgtctggttcgtgcgcattctgcagacgagcgacgccatcctctccctcaagcagagcggcaactgggtcgcgctgcagggcgtggagcttctcacgatgctggtcgcggcggccttcggcgcgctgttctcgctgcttctgagctttgcctctatcaacctgcgtgccgaccagaccatcggtggcacggcgctgaacctgatggcccccgcactggtgctgttcttcatccgcatcatcgccaaccagaatacgctgcagatgctcacgggcgacgcggcgagctggttcatgatcaaaaagtctacgctcggcatcgacaagaacaccgacctcggctttttcggcgagacgttcgtcaacaaggtctaccttgcgacctacgtctgcatcctgcttttcatcatcctgtcgatcctgctctataagacgcgcttcggcctgcgcctgcgcgcctgcggcgaaaatccccaggcggcggattcgctgggcatcaacgtctacaagatgcgctacgcgggcacgaccatttccggcgcgctcgcgggcatgggcggcttcgtctatgcgctgacaacggcaaactgcgcctcgaacggcgacgttgcgggcttcggcttcctcgcactggccgttatgatcttcggcaactggaagcccgtgaatatcgcggtctcctcgctgctgttcggcctcttcaagtgcatcgcggcaagctatgcgagcatcgacatcaacggcgacggcgtcttcatgttggcggagatcggcatcagcgcccatctctaccgcatgctgccgtatatcgtcacgctgctcgtgctggcgttcacgtccaagagctcccgcgcccccaaggccgagggcatcccctacgacaagggccagcggtaacgtacatcaaaaagcggtatggcaatgccataccgcttttttgcaaatgaaatctatggagagaactatggagatcagagaaattacgactcccgatgaaaagcggcgcattacgcgcttgattttagaatcgctgcccgactggtttggcattccagaggcgcgcgaggaatacatcgaaaagagtgttaagcagccgtttttcgccgcgttcgacggcgagaacgccgtcggcttcctttaccttgccgaaacggggagggatacagcggaactctatgtcatgggcgtgctgaaagaataccaccgccgcggcgtcggcaagatgctctttgccgcagcgaagcagcgggcgaaggagcttggctactcgtttttgcaggtcaagaccgtgcagatggggaagtaccctgagtacgacgcgacgaaccgcttctatctcgccctcggttttggcgagtttgaggtattcccgacgctctgggacgagtggaacccgtgtcaaatctacgtgatgagcctgaaataagaaaatgttggaactttttcccgctgttttgcgtctataaaagcagaaaaacaggggagggaagcatatgaccgtccgcgaaccgaaaaaacgctctaatttgcggctgaagctcggcggcgcgtattttagcgcgcagcgaaaactcagatggctttcgatgcggaagcattttgcgcgcgagcgcagcggggaagacttagcgtatcaggcgttttcccaccatacgccgctcatgcgaaagctcaaggacgtcgacatgcagctccagcgcaacaaggtgacgaatctccgcctcgcctgtgcgcggctcgacgggcttttgctgcgccccggtgaaacgatgagctactggtatctcatcggaaagccgacggcggggaaggggtatctgcccggcatgatcctgcgcaacggcgggtatctggccgcgacgggcggcgggctctgccagctctcaaacctcatctactggatgacgctgcacacgccgctcacggtcgtcgagcgccaccgccacggctacgacgtctttcccgacgcgaaccgcacgcagcccttcggcagcggtgcgacctgcttttacccctatcttgacctgatgatccgcaacgacacacaggacacctatcagatgcgcgtccgcgtcggcaaaacagaccttgagggcgagtggcgcgtgagcgccgagccgaccgagcgctatgcggtcgtcgagcgcagccacgagatgcgcgcgcagtactggggcggctacatccgccacaacgagctctaccggcagacgtttgatttgcagggcaagctgctcgcggagacgcctgtcgccgtgaacgacgcggtgatgatgtattcgccgtatctcgaagaaagcaaaaaggaaggctgacaaagtcaaccttccttttatcttattcagccgtttcgtccgcctcttcgggcgtatcctcttcctcgggctcttcccacggctgcatcgtggcgacgcagcggttgatgttcttgccctcggcatagaatttggcctcgtagtcggtcatcacgccgcgctgtccgttcgcgtgcagatcgcgtgtgacctcagagagttcgaagccaaactgcgggatctcctcgatcgaccactcaaacagcgggtcgttgtcggtcttgaaatgaatttggccgttgtccttgagcaccttgcggtagagcttcaagaaattgccgtgcgtcagccggcgcttggcctgccgcttgggcggccacgggtcgcagaagttgacatagatgcggtcgacctcgcctgcatcgaaaatttcgggcagctggttggcgtcgatgtcgatgaagaagacgttgtgcagctctgccttcgccgcgcgctccatcgcgacgaccatcgcgtcgggcaccttttcgaccgcgatgagcagcacgtcgggctccgccgcggccgtctcgacggtgaagcggcccttgccgcagccgagctccacgcggatctccttcgcctcgggcatcaagtcgtgccagcggcccttgcgctcgtaggggtccttgatctgatacgccccgcaccgctccatgcggggaagcaggtttttctttttgcgcattcgcatagaatgaacctcgttttcctataattaaagcctatcatatcgaaaattggtgcaagagacaagtcattttaaaaattttatacaagagttgctgcattgggagaaaagatcattaaaaatgcaacgtttcttgcaatggcaccggaaaagtgtgaaacttttttgaaaaaagtgatttttctcttgcaaatatgccttgccgcccatataatagggagcagttgaagaagacgggaggagacacacgatgtcttttgtcaaatatgaacccaagggcaacattgcctatctcatcattgaccgcgaaaaggcgctcaacgcgctcaattctcaggtgctcgccgatctcgatgctgcgctcgacgcggtggacttaagcgagatccgctgcctgatcgtccgcggcgcgggcgagaagtcctttgtcgccggcgcggacatcgcgcagatgaaggagctcagcaaggaggaggccgaggccttcggcaagcagggcaacgacgtcatgcgcaagctcgaagcgttccccatcccgacgatcgcggcggtgggcggctatgccctcggcggcggctgcgagctcgcgatgagctgcgatttccgcatctgctccgataccgccgtcttcggccagcccgagacaggccttggcatcacgccgggctttggcggcacacagcgccttgcccgcctcgtcggccccggcatggccaagcagatgatctacaccgcccgcaacatcaaggcggacgaggcctaccgcatcggccttgtcaacgcggtctatccgctttctgacctctacgccgcggcggaaaagctcgccggccagatcgctggcaacgcgcccatcgcggtgcgcgcgtccaagcaggcaatcaacgacggtcttcaggtcgacattgaccgcgccgtcgtgatcgaggagaaggccttcggctcctgcttccagagtgccgaccagcaggagggcatgggcgccttcctcgaaaagcgcaagcacgagccctttatcaacaagtgattccatagaattatctatttatattgtaggaggatacacacaatgaaagttgcagttttcggcgccggcaccatgggcagcggcatcgctcaggtcttcgcggccaagggccacaccgctctgatgtacgcttccagcgtcgcttccgctcagcgccacaaggataagctcgccgcttccctgcagaagcgcgtcgagaagggcaagatgaccgaagaggccaaggacgccatcctgaacaacatcctcgtcgaggagaagtctgccgcggcggacgccgacctcgtcatcgagtgcgtggcggagaacatggacaccaagcgtcagctcctcggcgagctcgacgagatgtgcaaggagagcaccgtcttcgcgaccaacacctcttctctgtctgtcaccgagatgggtctcggcctcaagcacgccgtcatcggcatgcacttcttcaaccccgtgcccagcatgaagctcgttgaggtcatccgcggcgccaacaccacgcaggagaccttcgacttcatctacaacctctccaaggagatcggcaaggagcctgtcgaggtcgctgaggctccgggcttcgtcgtcaacaagatcctgatcccgatgatcaacgaggccatcggcctggtcgagaccggcgttgcctctgtcgaggatatcgacaaggccatgatgctcggcgcgaaccaccccatgggccccctcgccctgggcgacttcatcggccttgacgtgtgcctcgccattatgaacgtcctctacagcgagaccggcgatccgaagtatcgtcccgctctgctgctcaagaagatggtccgcggcggccagctcggcaagaagtccggcaagggcttctacgattacagcaagaagtaatccgtccctaaaaggataaaaaggagaggcagtttacaaaaactgcctccccttttctcttttggaatggaaaggattcctgaaaatgacagaaaactgtcataaaaggaacggaaatgtcaaaaaggctttaatgaattcggcaaaaagcacgaattccaaaaaggaatgatagttccccttgcgaaaatgaaacgcacaggatataatgagagtcacggaactgatttgtgaaaaattagacaatccaattatttttatagtgaaggagcaaaagactatggatttccatctgtccaaagaacatctgctggtccgcaaaatgtatcgcgaatttgcagaaaatgaagtcaagcctttagctgaggaactcgatgaggaagagcgcttccccatggagaccgtcgaaaagatggccaagctcggcatgatgggtatttacttcccgaagcagtacggcggcgccggcggcgatgttctcagttatgccatgtgcgtggaggagctcgctaaggtttgcggcaccaccgctgttatcgtttctgcccacacctccctctgctgcgctcccattttcgagaacggcaccgaggagcagaagatgaagtatctgcctgaccttctgtccggccgcaagatcggcgcgttcggtctgaccgagcccggcgccggtaccgatgcctccggccagcagaccaccgctgtcaagaacgagaacggcgactacgtcctcaacggcagcaagtgcttcatcaccaacggtaacgttgcctccactttcgtcgtgttcgccatgaccgacaagagcaagggcaaccacggtatcaccgccttcatcgttgagaaggacttccccggcttctccaccggtaagcacgagaagaagatgggtatccgcggcagctctacctgcgacctcgtcttcgaagactgcgtcgtccccaaggagaacctgctcggtaaggaaggcgaaggcttcaagatcgccatgaagaccctcgacggcggccgtatcggtatcgcctcccaggctctcggtcttgccgaaggcgccatcaacgaggctgtcaagtacaccaaggagcgtatccagtttggtcgccgcctgagccagttccagaacacccagttccagctggccgacatgcacacccgcactcaggctgcccagtacctcgtttacgctgccgctatgaagaagcagaatcacgaggattactccatggacgctgccatggccaagctcttcgcggccgagaccgcttccgacgtcacccgccgcgctgttcagctcttcggcggctatggctacacccgtgagtatcccgttgagcgcatgatgcgcgatgccaagatcaccgagatctacgagggcacttccgaagtccagcgtatggtcgttgccaagtatcttggtgtgaactaaaaaaggaggtaaagatataatgaagattcttgtttgcgttaagcaggtccccgatacctccggtaaggttgccgtcaatcccgatggtaccctgaaccgcgcttccatgcagaccatcatcaaccccgatgatatgaacgccgttgaggccgctctcaagctcaaggatgagctgggctgcaaggtcaccgtcgtcaccatgggtcccccgccggcagaaggtatgctgcgcgagctgatggccatgggcgctgatgacggctatctcgtttccgcccgtgagttcggcggttccgatacttacgccacctcccagatccttgccgccgctctcgacaccatcggtctcgatgacgacgacatcgtcttctgcggccgtcaggctatcgatggtgataccgctcaggtcggtcctcagatcgctgagaagctgcacctgccccagatcacctacgccgccgatgtgaagaaggaaggcaacaccctgaccgtcaagcgcatgctcgaggacggctacatgaccatcaaggctcagactccgtgcctgatcacctgcatcaaggagctcaataccccgcgttatatgagcgtctccggtgtgtttgagtgctattccaagcccatgaaggtcctcgattacgaggcgctgaaggatcatgaactgatcgacgccacgaccatcggcctcaagggctccccgaccaacatcctgacctccttcacgcccccccagaagggcgccggtcagatgctcgagggcaacgacatggctacctgcgagaagctcgccggcatcctgctcgaaaaacacatcatttaaggaaaggagatcaatacgatgcgtaacgaagtgaaacttgctaatcccaactatgactcctccaagatcgaagagttcaagaacgtatgggtcttctgcgaacagcgtcagggccagatgatgtccacctcctatgagctgatctccgaaggccgcaagctggcggacgagctgggcgtgaagctctgcggtctgctggtcggcgacaatgtcggcgatctcgccgagagcattggcggctacggcgctgatgaggtcatcgtctgcgaccaccccctgctgaagaactacaccaccgacgcctatgccaaggtcatctgcgacgtcatctccgagatgaagcccgaggccttcctcatcggcgcgaccaacatcggccgtgacctcggcccccgctgcgcagcccgtctgcacaccggtctctgcgccgactgcacccacctcgacgttgacatgcccatctacaaggacttcctgcgcggcgcttccacgctgcccgaggccaagatcgacggcatggccaccgcgaaggtcatgggtaaggaccacgatgtctctcgcgacctgaagatgacccgtcccgcgttcggcggcaacctgatggctaccatcatctgcccgcgcttccgtccctccatggcgacggtccgtcccggcgttatgaagaaggctgcttacgacgaggcgaaggccaaggccgttaaggtcaccaagtacgacgtcaagctcgacgccgccgatctccagaccgaggtcgtcgaggtcgtcaaggctgccaagaagctcgtcgacctgatcggcgctgactacatcgtctccgtcggccgtggtatctccaaggacgtcgagggcggcatcaagctggccgaagagctggcggac

SEQ ID NO: 102 - DNA, 7433 bp, unidentified
  source 1..7433: mol_type = unassigned DNA
atgtctctttccgaagaagcaatcactcttcagcgtgctgcgcacgaactgatgtatttgggtatggacggcagtcccgtctatagcgatgacttgtcacggcggaacggtgaggtctaccgtcttaccatggctttataccggtcgggtgtaaaaggcactaccatcgaagagcaggcaaatgtctgtcttgcccttcttatgggttacagcgcctcttttgtggaccatggcgaaaagcagcagcatgtccaggaagtgctggactgttgttgggatgtgctcgacgcccttcccgcttccttactgaagctccgtctgcttaccgcctgctacggtgaagtgttcgacgagtctttggccgacgaaggccgttccatcatcgcctcctgggattccttatcacttactcccgaacagcaggaagcggttgatgaatttcagaatgtgacagacaatccctatccatgggaatatatcgatgaataaaacttttcatataatgcttaacaataaatccgtattgattaccggaggaacgggttccttcggaaagaagtttgtggaaaccattctccgtgattatccgcaagtaaagaaaattattatttactcccgcgatgagctgaagcaatttgagctgaaacagaaatatcccggtcataagtatccgcaactacgtttctttatcggtgatgtccgtgacctcgaacgcctgacgcgggcttgcgaaggagtggacgtgattatccatgcagccgccatcaagcaggtggataccgctgaatacaatcccgaagagtgcatcaaaaccaatgtacacggtgcgcagaatgtgataaaggctgctcttgccaccggtgtacagcatgtggtggccctttctactgacaaggcttgtgcccccattaatctttatggcgccaccaagctcacttccgacaagctgtttactgccgccaacaatatcagcggttccaaggacatcaggttctccgtagtccgttatggcaatgtgatgggttcccgcggttccgtaatccctttctttatcaacaagcgtgacaacggggcgaaggaacttcccataaccgatatgcgcatgacccgtttcaacatttcactggaagccggtgtcgctttggtcatgtatgccatcggacatcacctgggtggtgaaatctttattcctaagattccttcctatcatatccaggacgtggctaccgccattgcacccaatctgccgcaggtggaagtgggcatccgtccgggagagaaactgcacgaggagatgattactgtaaccgatgctcttgatacaatcgatttgggcagatattatgtcattcttccttccgtatctttcaagcacagtcgcgaagagttcatcagacatcacaatgcagtacccgttcccgacggtttccactacagcagtgacaacaatacggagtgggagacagtagagactatgcgcgagaatatcaagaaatacgttgaccctaatttcgaggtgaaatgataagcaagcctattccatacggtcgtcagcatatcacagatgaggacatccgggcagtcatcgataccctgaaaagcgattacctgacacaaggtcccaaaatcagggaatttgaaacgaaatttgccgaatatgtaggtgcacaatatgccgtagcggtgaacaatgctacttcggggcttcatcttgcagctaccgcactgaatgtaaagccgggtgacaaggtgattgtcactcccatgacctttgctgccagtgccaactgcattcgctattgtggcggcgaggtggtattctgtgatattgacaaggatacttacctcatggatatccgtaaactcgaagccatgcttaaagcttctcctcgcggtacttacaaaggtattgttccggttgattttgcaggctatcctttggatctggaagagttcagaaagcttgccgacgagtacggtttgtggattatcgaggatgcctgccatgctcccggcggctatttcatggacagtaaaggcaagaaacaacattgtggtaacggttgttttgccgactgtgccgtattctctttccatcccgtgaaacatatcgctacgggtgagggaggcatggtgaccaccaacagcaaggagctctatgacaagctttgtctttaccgtacgcatggcattacgaaagaccctgccttattgcacgagcatcatggtggctggtattacgagatgcaggagttagggtataattaccgtctgactgattttcaggctgccttgggtatttctcagctggagcgtgcgaaagcaggtcttgaacgtcgtcatgaaatcgtaagacgctataatgaagcgttttccggaatagatggtatcaagactccgttcaatactgccgatgtctatcatgcttatcacctttatatcattcaagtagctgaccgcttgggtctttataattatctgcacgagaacaatgtctatgcgcaggttcattatgctccgcttcatctgatgccttactatcagcagtggggcaataggaaaggcgatttacctatagtagaagagtattacgaacattgtctgagtcttccgatgtatcccacgctgacggacgaggaacaggagtatgtgattgaaaaggttatagaatttgtagcgaaatgaaaaatatagcaatcattcctgcacgtggcggcagtaaacgtattccgcgtaagaatatcaagccctttatgggtaaacctatcattgcatattccatagaggcagctttacaaagcggtctttttgaggaggtgatggtttctaccgatgatgaggagattgccggaatagcttgtaagtatggtgccaaagttccttttatgcggagtgccgagatgtcaaatgaatatgccggtactgatgatgtaattcttgaagtactgaggaagtataaagagcaaggcagggagtttgaaacggtttgttgcatttactcaacggctccttttgtcactcccgaaagactccgggaagcatacggaaaaatgaattcggagatagattccgttttcacttgtgtggcttattcctatcctatacagcgcagccttcacatcgtggatggaaaaattagtatggtttatcccgaatacaaaaatgcacgttcccaagatttagaaccgatttatcacgatgccggtcagttctatttctctcgcactgctccctttgtggagagccggactttttggggtgagaatacagccgggttggtactttccgaacttgaagtgcaggaccttgatacacagactgactgggcattggcagagatgaagtatgagttgcttcataaatgatgtaatgcagaaaatctatctccgtgccgatgcaagtgctgccatcggctacggtcactttattcgtactctggctttggccgatatgctgaaggacgattttgattgtaccttctttacttgccatcctaccccttatcaggtgagtgagatggagaaggtatgtcctttcatccccttacaggaagaatcacattatgatgagttcctttcccttttgcaaggtgacgaaattgtggtacttgacaactatttctttactactgattaccagcgtgccatcaagcaaaaaggttgctgtctggtgtgtgtggatgatatgcacgacaagcactatgtggctgatcttatagtcaatcagggattgggttacacgcgtgatgactattcgtgtgaaccatatactcaatttgcctttgggcttcaattttcattgttgaggaggcctttcttcaatgttgcgctgcagaataaacggaacaattattcaggaggtttatatgtattggtggcttttggtggttctgatttcttgaatttgacgtatcagaccattcatgcaattaaagccaaagacaatgtgaagaagataacggcaattgtcggtgattcgtatgcagccgagaatatggttgatgaccccaaagtaacctatcagaagaatttgtctgccggttccattgcagacttgtttagtactgtagatgtcgccatattgcctgcctctacgatgatgaatgaggcattggcctgtggaactcctgttataggagggtattatgttgataatcaggagcacgactattatatgtttttgcgtgaagggctgattcagggggcgggtgattataccgatgccgctgcctttactcttgttgctgagaatttggataagatggccattcgtaaaagacatgccatcactccggatattcccaaacggtttgtcaatttgtttaaaagtctgttgatatgcaagtaacttcacaaagagcttcggccatattgtataattatctgtctggcaaccattttgataaaccgttcttattgccggcaaatgtgtgtcctgtagtgcccctgtcgtttatgaaagcaggtgtcggttttgagtttatagacatagatgaaagccatgccatgtcaaccgagaaatgtttgacagctatagaggcgggaaaatattccggtcttgtatttgtgcatgcctacgggaaaaagtatgacaacaaagaattttaccgggcagtgaaaagtctcgatccaaatctttgtatcattgatgattgttgcttgtgcattcccgaattggcagattccttgcctgaaaatgtggatctctgcctttacagtaccggatatgccaaattcatagaactttcctatggtggctatgcaagttttaggggggggtacgaagttgttgattatcagtatgatagcattagtgaacaaaagcattcggtatatataaggaaatgtctcctggagaatgtcagatatatgcttccggctgactatccttggctggacgcctcaaatttacaaatgaccgatgaggaatattttgacatcattgaaagaaagctcccaaaagtgattgcggaaaaagagaaaataaacaagatatacaggaatctgcttcctgaatcgattcagatgggagatgatttccagaactggaggttcatgattgtcatcgagaaccggcagaaggttcttgacgcaatattcaaggccggtctgtttgccgggactaatttcccttcggtttcatacatgttcaaaggtgtttcttctcctgttgcggaagtggaggcgaagcatatcgtcaatttgtttaatgatttccggttcagtgaagcacaggcaagaaagatctgtgatgtgataaattcggttatatgaataaaagattattgatactgggcgcaggtgaaatgcaggttcctgtcatccgaaaggcgaacgatatgggattgcataccatagtcgcagatatggatgcgaatgctccgggaatggggtacgcctcggaaccggttcttgtcagcacgatggataaggaaggtgttttggaatgtgccaaacgtcactctgttgacggcatacttactacaagtgacgcgcctgtaaatgtggtttcctatgtcggggaacagctggggcttccgtccatgtccactgaggtcgcaaaaatctgtacaaacaaatacttgcagagggaaatgtttgcggccaacgggattgatgtaccatttttcatgctttgtgataaagatacggacttgggcacattgcaagattatccatatattgtcaaaccggtagattcctctgcaagccgcggagtaaaaaaggttacaaatcataaagaacttgtacttgctttttccgaagctctcggttattcccgtaccggaaaggccattgtcgagggctttataacaggccgtgaattcagtgttgaaacatatacgcaaaacaataaaactaccgttgtcactattacggagaaactttgtatcggtgaggcagaaggcttctttgttgaagatacgcacattgaaccggcgcgtataacgaaacaggagtgggagctggtttcggagaccgtatcaaaagcactttgcctgattggacttaataattgcccctcgcatacagaaataaagctgaatgaatcgggcgcttatatcatagaaattgcttgtcggcttggaggagattatataacctctgatttggttccattgtcaaccgggatagatatgctgagaaatctggtgaactgttctcttggtttgcccgttgatgtccttcgcaaacatgaaaaatgctcagcggtacagttccttaatccgctcaactatcagcgttgtgtggattttctaagctcttcccggtcatcggctgtttttcggtctgaaataagaccttattctgaaaaaaaaataaaaaactctttagaccgtttagggtatatcatacttcagactgatagtatggaagagcttgaaagtattctaaggacgattaaatagtaaagacatgagagataagtgtatgattgtggctgagatgtctgccaaccataacggtaagaaagaaacagccattgaaaccgtcagggctgcaaaacgtgccggagccgatgccgtcaagttgcagacctatcgggctgataccattacgcttcgctgtgacaagcctgattttataattaatgaaggctctatatgggacgggcaatatttttatgatttgtatgaacaggcttatactccttgggagtggcatgaagagttgttccatgtggccaaggaagaaggactgatctgtttttcttctccttttgataagacagccgtcgatatgcttgaggctttggactgtcccgtttataagatagcttctttcgaaattacggatattccattgatagaatacgcggcttcgaagcataagccgatggtacttgctacaggcatagccaccgaagaagatattcaattggctgttgaagcttgccgcagaatgggaaataatgatattacggttcttaagtgtacctcttcttatccggctccagttgaggaagccaatctttgtatgattcgtgatttggcagaacgtttccaggtaaaaagtggactttccgaccataccctggggagtgtctctcccattgtggcggttactcaaggtgcgagtatgatagaaaagcactttattttgaatcgttccatcggtggtccggattgttctttttctatggaagagaaagattttgcccaaatggtaaaagatgtgcgcatggctgagttatctttggggaaaacgacttacgaattgacggagaaaatgagaggtagccgttccgcatcacgttctctctatgtggccgaggatatgaaggccggagaagtgattacggagcggaacgttcgctccgtccgtccgggcttcggcctgcaccccaaatatctgaaagatatattgggaaagaacgtgaaccgggatttggagaaagggacgaggtttgcattggagtacgtgaatggttag

SEQ ID NO: 103 - DNA, 7652 bp, unidentified
  source 1..7652: mol_type = unassigned DNA
ttatgcctgtatctcaccatcaaatatcatattccagctcatacggatatcatacatcagccttgtaagtgcaatactatcttccggtgtataaatagcactggcactatttcctgatgctatgcatctgcctgcttcacgaatctcatattcaaatccatttatatcaaccgggtactcgattgtttcaggttctttaccatccacctcaagtatcaaggtctttgcgtgttggaaatccggcaaaaatatacttccctttgttccctcaattctggcattacgttttaactcctgccctattgtctggactgattctgcaatacatccatcattatatgtcagtttgagacaactgtaatcatctgttccattctcattaatatgtacttttgtggtttctacattctgcggatcacaccctgtaacaatacgcaaaaatcccagattgtaaattcctatatccaacagagcacctccaccaagtgcagagttaaatttacgctcttttctggcacccgttgcaacaaatccatactgacaggaaatatgtttaatttctcctattgttccctgaagcaggatattacgcagacgattatacaatggcagaaaccatatccataatccctccatgataaaaagatgcttatcctttgccagcctgtacagctcctgtgcctgtttctcatttattgtaaatggcttttcacaaagtacatgcttaccatgctcaagacaaagtctgcaattctcataatgcagactattcggtgttgctacataaacagcctcaacatccggatcatttactaatgcttcataagaatcataatatcgtggaatgtcatactccctggcaaaagcttttgcactatccatgtgccgtgagcctactgctgcaagctgttcattttccttactcatctgatttatagttgatgcaaattttcttgcaatattacctgtagccagaattccccacttcatatcattttcctcctaataatataattgcatttcacattcatatcttgttaataattatacactattttaccgcatacaccaacacaaaatagcaagtcaaatttcatattatttactgtcacaactatcgtacgcttcattattgttatataaaattcttatattaatcaaaatttttcaacacaatctaaaaaaagctgccacacatcattcttagtgcggcagcccctttgtggtaatagggtaattaataatttatatttcacatgctacatcatatgctgatttaatagcatgatcaatattacttggacgttctccagcacaatcaccaatatagtgaagtggaagaggacaatcagaaagctctggaaggttctttcttgcaccaacagccattacaacaaagtctgaagcaatttcttctgttgatgtattgtcgtctattgttttttcaacaactacagaatcatctttgatttctgataattttgcagatgttactatttgaacattataatgctctaattccctcattagagtaggtaaaatagtgttactttcttcttttgcaatctgatccatcatttcaataattgtaaccttacatcctcgtgaagccagatattcagcggtttcaacacctacaagaccaccaccgattacagaaacattaccgaatacgatttctttcttggcaagtacatcccatgcacttgctacagttggaagatctttgccaggaacagggattattgcattgtttgctcctgttgccacaattacttcatcgaatgaattataatcctgtgatgtgaattcctgaccaagcctgaaagtaacatccaattcaggaagtacatttgtataataattaatgcttctcatcatttcttcttttcttggaggtacactagcaataagtaactgaccaccaatctgaagtgatttctcaaatatagttacatgatgtcctcttaatgcggaaacacgtgcagcttcaagtccagcaataccagcaccaataattgctatattctttgttgatgctgcaggagtaatctgacgagatccttcgtaaccattttcagcattaagtacacaacttaagaaagcacgattctgaatattatctgtacatcctttattacacatcatacatgttctgacattacagcaatgtccatctgcgcatttgtttgcaaagtcagggtctgtgagaagagaacgacctaatccaataatatcagcagaaccatttgtaataactgcttcagcagcttctggtgtaacgatacggcctactacagatacaggaatagatacaagctctttgatttttttagaataagaaaccataaatccgtatggctgtgttcccatggcagggattgtatcacccatatttccagtatggttagcctgtgcaacatgtaatgtgtcaacaccgcaagcttctaattctttagcaaaaatgcaagcttcatcaagtggaagaccaccttttcctctaaaactattttctccaagaggagtaactataggaagcttgtagtcgataaccatgtcaggtacaattgtttttaatctttttacgagtgttaatgcaaaacgtgtacgattagccaggtcaccgccatattcatcagttctatgatttaaaataggagagcagagagaaccaacaagacggtctccatgtacttcaatacaatcaacaccagcttcgtgtgctaagatagcacagttttccatatgctttattatttcatcaagttcttctgcagttacttcatttacaaagtgctgcatatcatggtgaagtttagctcttgcttcctgcattttgccctgatgaaacatatcgtttaaagctttaacattgtagtcaggatggaataactgaattccaagctttgcaccattttcatgacatgcgtcagcaagttttttgaagctttgaacctgctcaggtgaataaagctttggtgtaggagagaatgttggaagtggtgcaacatctccaattactatatatccgacaccgccttttgcgagacgctcgtaaaaacgaaaactttgttctccaattgaaccatctttttcctcatatcctgttgtaagtggtgggaacataatacggtttttaaactcaatatttccaacttttataggctctaataatttcattgttcatacttcctttcaaattgaatatactatttaagtggtgttaaaaactctaacattaatttgtctaattctgctcttgcaaaagcactggcaaaattgtggttagcgccttcaattgttttataattgcattttccattgtaaagtgactcatatttatggcatgttgcatcatctaccaaatcatctgcagttcctcttataaggaggactggtccgttgtatccttctgctgacgagaatggctcataattaaataaatcataattaaaagatgttgggaaagtgagtccttcaatatcggccttggtgatccccttagcttccatggcttcagcacgatccttacatccaaaccacattccagcacctggacacataagcatgagagcataaggattaacaataggagcggcagtagcagctgcgtatcctcccatactctgaccagataagataatcttatctggattggcaaaatcttgtgttttagtccagtttataatatcctcgatatcgtgtaggatacctgtaaaggtcatgtcctcgaattcaccatcactttcaccatttccgtataaatcaaaacggacactggcaaatccatgttcagctaataatctggctgtgtgcgtataaatacttttgtaaccgcttttattccctgtaaagccatgtacatttacaatagcaggaaatcttgtgccatcttctggaatgttaactattccgcgtaagatgtgtccatcacggtttgtgatttctacttgttttgtcaattttaaatacctcaatttctaattttattctgcagttgtagcatttcgcttgtcagctaaatcctgtaacatttcagctgttttctcttttgtaagagggtagataaattttaataccagaacagctaataaatatcctacaacatataaacctgtatatgttttccaaagatgtcctgagaatgcttcattctggacagcttcattaacctggaatccagcaattgcaagtgcaaaactactcatacttcctgatacagcattagcaagtttacggaagaatgtatatgccgaatatacaattccttcattacgttttcctgtctgaagttcttgataatcaattgcatcatttacaagtgcccaaactaatacttggaaaccacttactccaagatagcagattccgttgatgataataaagagcataggattttcaagtgggaagaagaataaaatagcataaacaacaactgagaaagttgcactgtacataatccattctttctttccaaatttcttagcaacaaattttgtgcctacgaatgcaataagtgaccagagtacacttaacatacctgaaaatgccatgatggcaacatttccaaaataatcgcggaataaataagtatttaatccgttaaccatacctgctccaacaataccgataaagcttgataacataactccgagtaatgctttgtttttagtaatatctttaattacctggaagtagttaaacttttcttttttctcaacaactggctctctaataatacgctctttacaccaatgagatgtaaacataagacagattaatccaaaaactgcacagattgctgacataataaggaaatggctaggtactggctggttatctttatataagaataatggtccaacaataacgataactgtcataaaaattgtaccgccaagacttctgaaacgagaaaggtcagtacgttggttaacatcatcagtcattacacttgaaagactaccaaatggaacgttgacacatgtgtacataatttcgtaaacaatatatgtaatgaacatataagcaatacgtgcaccataagcgaaattgtttacgttaacaaatcctaatatacagagtactgcagttggaaaagcaaagaatttaatccaaggaataaattttccttttcctttgtttttgtggctatcaacaagtgcaccaattaaagggtcatttatagcatcccaaaactttgtaacaagcataaggattcctacgtgtactggattaacttttaataccagtgtataaaaaatagcaagatacatggcacggaactgctcagtacagcaacatcccaaatcgccaagagtgtaaccaattttgtccttcatggaaaaaggtcttgtttctttcatgataatttacctccaaacatttatattgttttagtagctacaatcttattatattggggttatgctgatatccatatacaaatattgcttgcaaactacgaaaaattgatatattgtatattttgacgaaatgaacaaaaaatataataggaaagtgtacaaaatagacatatgaaaaagcaaggctacaaaatggaatatttgaaaatattggatagtgcccagcgaagctttgggcaaaaggagagctatacaattgtatttatagctggtgggatagggtatatgcaccaggaggacgataatattgtatgtactatggaggatttgatatttattaagccaggtaataaagtaaagcttgaatatcgtaaaaataagtatcctcttaaagtttatgttctttatataggtggagaacttttaaggaaattgtcagatgaagaaacaagacttgatgaagcgtttgattttgttccgtatcaagttaagattgttcattctgagactgaatcggctatgcttataaagaatatatcaaaaaagctctattcgatgaataatgagccgcctaaatttgcccactcattatacgagaaaagcctattaactatgattcttgtacttgcacttcgctcatctgttcaggatgatgtacagatcaagacgaagaagaaaaaacacgttgtaatggatgatatttttatttatatcagagaacatttgacagaagatatctcgttggagcgcttggaaaatgaattttatataagccgttatcatatagtaagagagtttaaaaaattgacaggtgagacacctcattcatacattgtaaagagcaaacttgatttatgccgccattatatagagcaggggaaaagtattcatgaggtatatgagcttggtggatttggagggtataatcatttttttagagcatttaagaaagaatatggtgttactccaatgcaatattacaaagatttaaagattgacaggaatgaaaagtaatgattgtgtttgtagaataaagcaaataaggggctgtcgctttaacgatgcgacagccacagcatttttaaaattttcaatttgatgtgaatactgttcattcataagtgatgaatgaatcataaaatccgcagttgcaatattatttgcaatcggaatatcatacacctgtgcaattctaataagagctttaacatctacatacatccaatctgtcatttttatctatcatgcaaaaaattgatatacagttcttgacttgaatattttgtatgctggcaatatacaacttggaaattctggattattacatgaattaggatagaattgagtttcaaaacatacaccgcttcgcttattatatatagcaccatcttttcctatttgaccatttaaataatttcctgtataaacctgtaatccacataaatcagaataaacatccatcctgattccactgtctgccccatacagttttgcaacttttctcgtctttctgtcatttggaaatatataattatgatcataaccacctgcaatttttatctgtgaattatctgcatctatatcttttcctatctgcttacttttacgaaaatcaaatggtgtatcactaatatctataatttctcctgtcggaatcatatcattgccaagctcaagcatctgtcccgaatatatttccatatagtgtttaaggattgtaccagaattatgcccatctaaattaaaataactatgatttgtaggatttacaaccgtagccatatcactaagcatttcataatcaattataaattcatttttatctgtgagtgtatatctgattttctgctctaaatttcccggaaatccttgctccatattaggactatatcgttccatttccacaaactcacatgcatcagtctttccatttcttacactgtaaagtttatgatgtgatctattaaacccactgtgaagattattttgattatcatttttatccaacagatactttatatcttctattgttacttctgcccctgcaatacggttagcatttctgcctatatatgcaccaaaacctgtattctgttcataataatccatcagattatcataaccaagtacaacatctcgttttcttccatacttatcaagtacataaatggataataccaatgctccaaaatcagataattccacactcatacctttattgtttaccaagatatatctatgtgctttttttccttctttcgtcacaccaaaaactgtattccacat

SEQ ID NO: 104 - DNA, 13949 bp, unidentified
  source 1..13949: mol_type = unassigned DNA
atgaaagtagtaatcctggctggcggccttggcacgcgcatcagcgaagaaagcgtctacaagcccaagccgatgatcgaaatcggcaacatgcccatcctgtggcatatcatgaaggaatattcctactacggctttcacgactttgtcatctgcgcgggctacaagcagcacatgatcaaggagtggttcgcggattacttcctgcataccagcgatattacgtttgatttcacccgcggccagaacgagatgatcgtccacaaccaccacaccgagccgtggaaggtcaccgttgtggacaccggcctcaacacgatgaccggcgggcgcatcaaacgcattcgtccctacatcggcaatgagaccttcatgatgacctacggcgacggcgtctgcgatgtggacattgccaagctggtggcattccaccgcgagaacggcaagatcgccacgctgaccgccgttcagcaggagcagcagaagggcgttctggatattgccgaggataattctgtccgttctttccgtgaaaagaaggccagtgacggcgcgcttatcaacgcgggctatatggtgctggagccgcagattttcgactatctggacggcgacgcctgcgtctttgagcagaagccgctgcagaagctggccgaggagggtcagctgatgagctatatccacaagggcttctggcagtgcatggacaccgcccgcgaaaagcaggtcctggagaaaatgcttgccaccggcaacgcgccctggaagaagtgggaggattgatgatggtacattacgatcctgaattttaccgcggcaagcgggtgttcgtcaccggtcacaccggtttcaagggcagctggctctgcaagatgctgctgatggccggggccgaggtcacgggctacagcctgcagccgccgacgcagccgaaccttttctccatcgccggcgtggaggacaagatgcacagcgtcatcggcgacatccgcgactttgacgcgctgaaggccgcttttgacgcggcacagctcgacattgtgctgcacctggccgcgcagcccatcgtgcgtgacagctacaaggacccgcgctacacctatgagacgaacgttatgggtacggtcaacctgctggaatgtgtgcggctggccctgcagcagggcagagcgccccgctcggtgctgaacgtcaccaccgacaaggtctaccacaacaacgagtgggcctggggctaccgcgagaacgagccgctggacggtttcgacccctactccaacagcaagagctgctcggagctggcgacgcactcctacatcaacagcttttttgccgataaggctgtggctgtctcgacggcccgcgcgggcaatgtcatcggcggcggcgactttgccaatgaccgcatcatccccgactgcgtccgcgccatggccgcgggccgtaagatcggcgtgcgcaacccctactcgacccgcccgtaccagcatgtgctggagccgctggcggcctacctgctgatcgcccagcgccagtacgaggacagccgctttgcgggctactataatgtaggccccgacgactgcgactgcgtcaccaccggcacgctggtggatctgttctgccgggcctggggcggcgacgccgcctgggagaatcaggccgaggccaatgccccgcacgaggccaacttcctgaagctggactgcagcaagctgaaaacgaccttcggctggacgccgcgctggcacatggccgagtgcatggaaaagactgtcgccttcagcaagatctggcttgccaacggcgacgtcccggcggagatggaaaaggaaatcaatatttttttggaggagcaataattatgtggaagaacgaggcagaagcccgcgagcagatcaaggcgatggtcgccgagtattatcacgacttcaaggagaaaaaggccccttatcaggagggtgaccgcatcacctacgcagcccgcgtctttgacgagaaggaaatgtgcgccctgactgacgccacgctggacttctggctgacgacgggccgctttgccgaccagttcgaaaaggagttcgctaagtggatcggcgttaagttcgcccatctggtcaacagcggttcctccgccaatctgatcgccttcatggcgctgaccgcccccgagctgggtgaccgccagatcaggaagggcgacgagatcatcaccgtggcctgcggcttccccaccaccgtgaccccggccatccagtacggcgcggtgcccgtgtttgtggatgtgaccgtgccccagtacaacatcgacgtcaccaagctcgaggccgccctctcccccaagacgaaggctgtcatgatcgcccatacactgggcaatccgtttgacttgtccgcagtcaaggcgttctgcgatgcacataatctgtggttggtcgaggacaactgcgacgcgctgggcacccagtacaccatcaacggcgagacccgctttaccggcacctggggcgacatcggcacgtccagcttctacccgccgcaccacatgacgatgggcgagggcggctgcgtttacaccaacaacccgctgctgaaccgcctgatcctctccttccgcgactggggccgcgactgcatctgcccctccggccaggataacttctgcggccaccgctttgacggtcagttcggcgagctgcccaagggttacgaccacaagtacgtctacagccactttggctataacctcaaggtcaccgacatgcaggccgccatcggctgcgagcagctgaagaagttccccaccttcatcgagcgccgccgccacaactgggaccgcctgcgcgccgcgctggagcccgccgccgacaagctgatcctgccggagccggctgccaacagccgcccgtcctggttcggcttcctgatctccgtcaagccggagagcggcctggaccgcaacgccgtgacccgctatgtggagagccacaacgtgcagacccgtctgctgttcagcggcaacctcatcaagcacccctgctttgaccagatccgcggcaccgatgcctaccgcgttgttggcgaattgaccaacaccgactttatcatgaacaacaccttctgggtcggcgtttaccccggcatgaccgatgagatgatcgactacatggccaagacgattatcgaggctgtgaatcagtaaaattttgacaacgaggtacggacccctatgatgcagcaaaaagtgaaaacgacccgcgcacccggactgcggttggacaaaaacaggcggctgacgcctatgcagatttactgctgggcgacggtggcctgtctggcggtgctgctgcttgccctgctggccagccgtggtgcgctgctgcatcaattcttcttttatgatgtcaccgataccggtatggactttttccatagtattgagtatatgcgtggacgtatgccctacggacagttcgatacgctgtacccgccgcttgcaaatctgtttttctatgtgttgtatttgcttgtgccaaagacacaatcagatacctggacggaatcgtttatctcgtctctcaacatgaagggaacagaacgggatttgcgtttacagcaagcgacgatgatgctgtttatcgtctttgttatcgtggtggtcttaggaattgtatcgatgacagaacgcctgacgcgcagctgcggggggcggaaaaagctgctggcattctgtgcagtgttcagctatggggtactgtacggcttggaacgtggcaatattctgctgctgtgctggccgttaatggcattttttatcctgtaccgcaattcagaaaaaccacttttgcgggagttggcctgtctggcactggcgattgccgccggtttcaagctgtacccggcgtttctgggcgtgctgctgctgcgcgataaaaactatctggccgcggtgcgcacggtgctgtacggtgttgtctgcctgtgcttcccgctgttcttcttcaatgaaggattgtttggcctcacactgtggttccgtgtactgtttgattttagcggcagcagaggtgaaccgtggatcggcaacggtttctccaacattttggcagaggctggacatgcggtggacaagctgctgggcacgcagctgggctatggcagctacgcactgctgggcattgtgctggctgcggtgctgctggtgtgcagcttttttatggataaggagtggaagcgcattacagcaatcattctggcgatgctgatgttccagtcccagtatgattatgtatggtgcctgtttttgattccgctgttcctgtttatggagcaggagcatgagctgcgcatggacaacgtgctgccctatctggccttgatggtgccggtgctgccgctgccgctgttccggcgggatcagatggagccgtcctttgtaccgcgcaacacgatttgtcatgccatgctgctgctgctcattgcttggtgctttgtccaggcggtgcagggggtgcgtgtacgctgtgcggaaaagccggtcaaaccggcacacggacacccggcagccacggtgctgctggccgtttgtgtggcggtggccggtgtgggcggccagcagctgtggcagcgcacccacaactggggctttgactacagctacaacggccgactggatgccgagggcatccggcagaaggacgtgcaggacagcgacggcaacccggtagaggcaacatggagcggccacggcgcgtatattatgatttacaaccacgcgccatttacgcaaaagatgacggtcacgttccagacaggctacggcatggatttaaagcgcgcctatacgatgacgtttgaagcaccgaatctggaagatgctgatggtacaaccgggaagcagaagcagacggatattaagatcgaccatgagggccagacggtgtgctacacggtagatgtggcacctggccagacccaaatcgatgtgagctatgacggcccgatggcggtctatgatgcttcttcacgcaagaatggcaccttctcggtggcaaacctggcggtcaccagtgagggcgctgtggaggaaaccgaataacggaaggaaacatacactatgcagaaattgctggccctgctgggcgcaaaaaataaagaggaatttgtggagctgttcaagcagttcatcaagttcggcctggtgggcgtaagcaacacggctgtgtccatggcggtctactatatcttcctgtggatcagcccggacctgtatatggtcggcagcatcctgggcacgattctgagcattgccaacgcctttttctggaatgacaagtttgtctttactggcaacgccaatgactggcgcagcaagctcaagcggctgggcaagacctatgtcagctacggcggcacatcgattttgtccaacgtgctgctctggatcgaagttgcgttcttcagcgtaagcaagtccattgcgcccatcgttaatctgttagtgacgatcccgctaaactttgttatcaacaagttgtggacgtttagaaatgagaaataatcaatgaatagaaaaataaagacatgggcgtatgcaattcttttgttaaatataattgttgcgggaatcggtattgcaaagcttttatttgatgtttttaccggcaacggaaatacacaagttggaaacaatcaatatggatgccgtttatccgttaggatggacgacaattgttgaaaacgttgcgttactcttgatggaagtatcgattgtttttgaggaattgttttttaggagtagagaaaacggatgaaaaataaagagcgaaatggtaatattgagctgctgcggtttgtgttctgcgtaatgatggttttataccacgcatggtatgtgcgcagaggatatattggcgttgagttcttttttatggtgacggggtatttcctcgctgaaaagatatgtaggctaaatgcaagggaagcgagccgcccatcggtagaaaatgccatgaaggaagcaacgcgagatgttacgaagcgttatcgctcaatatttccgtacttttttgtcgccaccattttgggatttatagtgcgtgcctatgcacagaaatgggacaatgcagcaatcctgttgggcgtgcagttgattccagcggatttcttatacttgcaaaaccttggattttcgacaacatctgccacgggggtattatggtatctttccgctatgacttttgcggtttggacgctatatccgttactgcgcagacattataacgtgattgtgcaagcagctccgatgggaagccttttgatactgggagtgattctgcaaaactgtgggtcgctggacgcgccatgcacatttctgtttggctgggtcaatacaggaatattacgagctttcgcgggcatcctaggggggggtgacgataaataacattgcgtcaaaactgaggaaaatcaatgttggtgaaaaaacttccgcagcaatgacgatagtggagttggctggatatgtgtgggtactttaccacatttgggcgatgaatgaaacgcgtgttgcgttggacggcattgtagtcttagctcttggggtcgcgtttactattactgtaagcggaaaatcacttttttatgggaaatttaataatggttttgtgcgattcctggggaagacaacgatgcccatttttttaagtcacttctactgtgttcaatatttgccgaatatattggcaaggtatagtattgaagtgacagaattgcagcgcttagggatttcctttgctttctgtgcaatagcggcgggaatagtctattgtgtgggacaagttatagataggcaaatgaaaaaggttggtatcttttttgaacagcaagtgattaaaaagagcgaataagttgctgaaaaagtttaaaagataatgcttggtagggtagcatagcaatgttggcgtaagcaacacggctgtgtccatggcggtctactatatcttcctgtggatcagcccggacctgtatatggtcggcagcatcctgggcacgattctgagcattgccaacgcctttttctggaatgacaagtttgtctttactggcaacgccaatgactggcgcagcaagctcaagcggctgggcaagacctatgtcagctacggcggcacatcgattttgtccaacgtgctgctctggatcgaagttgcgttcttcagcgtaagcaagtccattgcgcccatcgttaatctgttagtgacgatcccgctaaactttgttatcaacaagttgtggacgtttagaaatgagaaataatcaatgaatagaaaaataaagacatgggcgtatgcaattcttttgttaaatataattgttgcgggaatcggtattgcaaagcttttatttgatgtttttaccggcaacggaaatacacaagacggattgcttttccagaacctgcatctaacagcgtacagcacggattcattcatggacttctttaatagcattcagtatggaaggaagccctatacagcaggagtgatttatccgccactgataaatttgatttatgctatattcgggatggggattccggacagcgttaaagcacagggtacacttgcatacaggacatcgctacaaggcattgtggcattagtgctgttttatgtaatggctgtattgctgtatatcattgcgtggaaagatgattctcgcttcaccaataaagaaaagctttttttgacaacagccacattttttacgctcccgttcatttacgctgtggagagaggaaatagcttactttggtgtgtcccgcttacaatgctatttgtaaataactataataagaaagaaaaaagcaaacgtatactggcaattgtagcgttagcacttgcagcctcaatgaaaatgtacccggtgttttttgggattttgcttgtgcgtgaaaagaaatggaaagaagcactaacggcagtggttgttggtgcgattacaatgtttgcaccttttcttttaatggaaaagggaaatcgtagtccgctactatggcttagtaacattgcaaaaacaagcgaaatgtttcaaagcaatggctatgggtataaagtaaacttgtctaacacaatagggtttattgagagtgaatttggcatacatattacgggaacaaattttttgataatagcggttttacttatcaacagccttttggtgttaatcaagaagaatatgcctcagtggaagtgcatggcgttgctggctcttatcacaatcttagtgcctggatttagctatacatacacaataatgtttatgctgattcccttcttttgctttttaggaagtgagcacgatcaaaaatgggactgttattatctgattctttttatgctgatgtttgtattgctaccgataaaaaatcagtttggcggtttggaagcaatcaatatggatgccgtttatccgttgggatggacgacaattgttgaaagcgttgcgttactcttgatggaagtatcgatagttatcgaagaattgcctttaaaaaacagggagaaataaagatgaaacagcgtttagcggattatgtggcggactttctggcggcgcgcggtgtgacggatgttttctccgtggttggcggcggcgctatgcacctgaacgatgcgctgggccataacccccggctgcatgtgacctacaaccaccatgagcaggcatgcgccattgcggcggaagcctacgcccggctggaaaataagatcgcggcggtctgcgtgaccaccggccccggcggcaccaacgcgctgaccggcgtcgtgggcggctggctggactccatccctatgttcattgtctccggccaggtgcgctatgacaccacggcccggtacgccttgcagtacaccggtacgccgctgcgcgccatgggcgaccaggagtacgacatcaccaagtccgtccagtacatgacgaagttcgccgccatgctggaggaccccaaggacattcgctacctgctggaaaaggcgtggcatctggctacaacgggccgccccggcccggtctggctggacatcccggtcaacttccagggcggctacatcgagactgacgagctgcgcagctacgaccccgccgaggatgacgcccagctgcccccgccggtggacgacgccacgatccggacgattctggaaaaaatcaagaacgccaaacgacccgtgttccacgcgggctatggcatccgcctgtccggcgggtatgcggcgttccgctccgtggcggaaaagctcaacatccccatcgtcacctactggaacgccgtggacctcatcgaggatgacaatccgctgtactgcgggcgcgccggcaacatgggtgaccgcccgggcaactgggctatccaaaacgcagacttaattctggccgtaggcacgcgtatttctatccgccaggtcggctacaactggaagacttgggcccgtgcggcagaggtcatcatggtggacattgaccaggccgagctgaaaaagccgaccctgcacgtcgaaatgccggtctgggccgacgcgaaggactttttgaccaagctggataaggtcgccgcggcccccgtgaacgcgggcggcgagtggctggccacctgccagcgctggaaacgcgactaccccgccgtcttgccccgccagtgggaggaaaacggcgagactgccaacgtctacgcctttgtgcgctatttaagcagttgcctgccggagaacagcctgaccgcggtctccaacggtgcgtgctgtgtcgtcggtaaccaggcgtatgtcatccagaagggcagccgaatggcaaacaacagcgccattgccagcatgggctacggtctgcccgcagccattggcacctgcatcggcggcggacgccgccagacgatctgcctcgagggcgacggctccatcatgatgaacctgcaggaactgcagaccatcctgacgaacaagctgccgatcaaaatcttcctcatcaacaacaacggttaccactctatccgcctgacgcagaacaaccttttcaaggagcactgcaaggtcggcatcggccccgagagcggcgacctgtccttcccggagtttgaaaagctcgcaaaggcgtttggctacccctactacagcgcccacagcaacgccgagatgaagcaggccgtggacacggtgctggcactggacggcccggctttctgcgagattttcaccgacacgaaacaggtctgggagcccaagagcagcaccaagcgcctgcccgacggcacgctggtcagccccccgttggaggacctggcccccttcctgccgcgtgaggagctggaaaagcagatgttcatcccgctgatgccggaagtgtaaggaaagtgggtagaatggaaaaatgaaaaaaatgcggaatggcaatattgaattgctgcggtttcttttctgtgcggacattgtgctgtaccatgcgggctttctgccgcgcggctatgtcggcgttgagttcttctttatggtgacgggcttctttctggcagacaaaatcttgacccggaatagcaaagaccagagaaagcccacgtgggagactctggtcggggaggccaccgccgacatctggaagcgatactgcgcaatcttcccgtatttcttcgcatccacggtgttgggctttgcggtgcgcgcttttgcgctgcactgggacttgcccacgtttctgacacatctgcagctgattccggcggatatgctgtacttgcagaacatcggctttacggttacgtcggccatcggcgttctgtggtatctgtcggccatgacgtttgcggtctgggtcctgtacccgctgctgcgccgccgctatgagctggtcgcgagcgtttcgcctgctgttatacttttgattctggggctgattcagcagaattgcggctccttggatgcaccctgcaccttcctgtatggctggctcaacacaggcctgctgcgtgcctttgcgggtattctgggcggcgtactggcctactatgtgacacagaaggtgcgtggcatcaacataacaaaaggaatggcggctgccctgacggtttttgaggtcgccgtgtacatatgggtgttctaccacacttggagccggaacgacttccgcccgttgctggatgcgtttgtcattgtggcattagggggggcgttcacggtcacggtaagcggcaagtcgctgctgtatcagaaattcgacaatgggtttgtgcgcttcttgggcaaggcgtctatgccgatcttcctgagccatttttatatggtgttctatctgtccaacgtgtttgaaatgctccacatggaggacacgttcggacagaagctcgcgttcaccatcggactcagtctactggcggcggcgattgtgtatgctgcaggccagctgatgtgcagactgataaaggcgtgggcggtatcctttcagaacaagctgaaggcaattaactaagcaggggttcaatatggaacaaggcaagagacaaatccacaccgccatcatcaccggtcctacgggggcaatcgggatggcgttgtgtgcaaagctgctggcggagggcgtgacggtctacgcggtcacccacccgggcagtgcgcgggcggcgctgctgccgcaggacgcgcggctgcatgtggtgccctgcgatgcggcggagctggcctcgctgccggagctgatcccggaaaaggccgatgcgttcttccactttgcgtgggcgcacacgatcggcccgggccgcaacgacatgccggcgcagatcgagaacatccgctacaccattgcggcctgccgcgccgcggcgcagctgggctgccaggtctttatcggggctggcagccaggccgagtatggccgcgtggagggtgtgctgaccgcgcagaccccctgcttcccggagaacggctacggcatggccaagctgtgcgccggccagatgagccgcgtcgagtgccagacgctgggcatggcccacatttggacgcgcattttgagcgtctacggcccgcacgacggtccggccacgatgatcagcggcaccattcgtaagctgctgcacggcgagaagcccgctctgaccgcgggcatccagcagtgggactacctgtacgctgccgacgcggcagctgcgttctacgcgctggccgtcagcggacaggacggcagagtctacccgctgggcagcggcacggcccgcccgctgaaggactacatcgagacgctgcgcgacgccatcgacccggcgctgccgctgggcttgggggaggtcccctacggcccgctgcaggtcatgcacctgcaggcggacacgtcggccttacaggaggacaccggctggcggcccgcgaccccgtttgaagaaggaatccacgaaaccattgagtgggtaaggaaagagacaaaatgagtgagaaaaagacgatttcggtaatgatcccctgctacaacgaggagcagaacgcccgccccatctatgaggctgtgcgcgatgagctggtcaagaactgcccgaactacgactatgagattttgttcatcgacaacaagagcgaggacggcacccgtgccatcatccggcagatctgcgccgaggacaagcacgtcaaggccatcttcaacgtcaagaacttcggccagttcaacagcccgtactacggcatgatccacacctccggtgattgcacgatcacgatgtgcgccgacttccaggaccctgtggagatgatccccaggtttgtggccgagtgggaaaagggctacaaaatcgtcattggccgcaagacccagagcaaggaaaacccggtcatgtactggctgcgcggctgctactacaagctcatcaagaagatgagcagctgcgagcagatcgagcagttcaccggctttggcctgtacgataagagctttatccagacgctgcgcaacttgaaggacccgacgcccttcatccgcggcattgtggccgagctgggccccgagcgcaaggaaatcgagtacacccagccccagcgccgcgcgggcaagacccacaacaactggtacagcctgtacgacgccgctatgctgagctttaccagctacaccaaggccggtatgcgcattgcaacgttcgcgggcttcctggtggcggggctgagctttctggtcggcctgttctatctgattgccaagctgctgttctggcagagcttccgcgccgggtacgcgccgacgatgatcgccatcttctttatgggcggcattcagctggcgttcctgggctttttgggtgagtacgtcatggctatgaacacccgcatcatgaaccgcccgctcgttgtggaggaagaacgcctcaactttgggccggacgaccagtgaccggcatgaagcaggagtttggttatttcctgaaaaacgcgaaattccgcgcggcgctggggctgaccctgctgctcagctacggctatgccatcgccacgacacgggtcagcattgactcgctggaaggggaccgctacatcggcacgggcggcgttatgctgtccaccggacggttcggcatgaacctctgggccgcggtgctgggctacggcagggccgagccgagttatgcctttggcattgacctgctggcggcgctgctgctggcgctggcggcggtgagcttctgtgcgctgctgcgcaaggccgcgcaggaccgcatcagcatgttcggctatgggctgtttgcctgcctgtttgtctcctacccgctgatgaacgaaatttgggagtacagcggcgcgaatgtctgcgtctgcggcggttatttgctggacgccgctgcgctgaatctgctgtgggacgcgcgccagcccggcgtgccgtggcgcggcagggctctgcgcatgggcgcggcg

SEQ ID NO: 105 - DNA, 8390 bp, unidentified
  source 1..8390: mol_type = unassigned DNA
atgaacggcaaaccgaacgtcgagcctgcgtggatgtcattgaaacgtctggtcgagacccgtatgatcgagatactccgcaaggaacaggacaacaaaagatacatccggctatacggaacggaagactattggcatgctttcgaagagtcggcctttcagttggagcggctcttccggaaaggagaaaccaccttgttcagacataaggactatccttttccagtggtgatggtcagcattcccgacagcgagttgcgggcttacatccagcagcatattccggtttgtgacaagcacgattacaagaaactgctggcggcagaattctccgccgcagagtatcgtgcatggcatgaacacgcggtgaaagagtttttgtaattctttacgattcccgatgttcgtatcgttttgcggaaattgaggccaaagtagtcacatgcgaccaagcacacgccttgattgatccctggctcacggaagaatcactcaaaaagagcaaggcacagctgattcgcctcttggccgatttcgaccgtcagtttggccgcggaggagagggggggggcatggattcgagatccgagcaggctgttttcggtcttcgaatttcaaacaaataaaatattcatacatcaaatcatgtatcgtttaattgaaaaactgcgactggatcgttatatcagttcacggttgattcttgcattggacctgttggtttcggtcggggcctctatcatctcgctgttagttgcaagcattcttttgggtgccgaagcccttatctggaaaacaatcggctggtggctcggaggatccgttgtcttttcctggatcgcgttcgtgttgctccaaacccacaaatcaatcatccgtcacgccaccttgcggggtttgggccgtttgagtatcgccgttgttttcaagggaattgggatcgcagttatattggctttgggtgtcgctggcccgacatttccagcgatctggatcactctgttgtttgacatattgttgagcctttcaggactggtgattatgcgcgttgccatggttgtcgtctatgactggctcaaagacagccgtcaaaggcattgcaaatgccagcggattctgatctacggaaccggcgacaagggcgtttcgttggtgacccaactccaaaattctcaagagtatcaggtcgtcggtttcctgacctacggcaaaacactgaagaatcatatgctggccgatctcccggtctactacttcgagaccgaagagaatgtcaagtacctgcacaactgcaaggatattgacgccattctcttcgcccacgtccatgaggctcgcgaagagcaggagcgcctaatccattattgtacggactgcaacctcaaggtgctgatcgctccctcgatcgacgaggtggtcgacggcaaggtgcagcgtcaggcaatccgcgagatcaggatcgaggacctgctgggacgtgaagagatcaagatctcgatggacgagatcatcgccaacttccgtggcaagacgatcctggttacgggcgcggcggggtccatcggttcggagttgtgccgccagctggcgacgttcggagtcaaggaactcgtgctgttcgacaactccgagacgccgatgcacaacatccgcctcgagttggaggatcgctaccccaatctgaagttcattcccgtaatcggcgacgtacgcatgattccgcgtctggatttcgtcttccgcacctatcgtccgcaggtggtcttccacgcagcagcctacaaacacgtgccgctgatggaggagaattcctgcgaagccgttctggccaacgttgccggctcgcgcaacgtggcggacaagtgtatcgaatatgacgtcgagaagatggttatgatctcgacggacaaggccgtcaacccgaccaacatcatgggctgtacaaaacgtctggccgagatctacgtgcagtcgctcggtctggccatcgaggccggcaaggtgaagggcaagacgaagttcgtcactacgcgtttcggcaacgtgctgggttcgaacggctcggtgatcccgcgcttccgcgagcagatagccaagggcggtccggttacggttacgcaccccgacatcacgcgcttcttcatgacgattccggaggcctgtcgtctggtaatggaggctgccacgatgtctacgggcacccagatctttgtcttcgacatgggtaagtcggtgaagatcgcccacctggccaggcgcatgatcgaactggccggtctggaggtcgacaaggacatcaagatcgaatacacgggactgcgcccgggcgaaaaactctatgaggaggtgctgtcgaatacggagaacacgcttccgacgtcacacgaccgtatccgcatcgccaaggtccgcgagtacgactacgccgatgctctcaagggtgcgcaggagttggaggagctttgccgcgccgtcgtcattccggacatggttcgcctgatgaagaaaatcgtccccgagttcaagtccaagaactcccgattcgaagagttcgataaagaaacaaagtaaaatcaaccataatgaacacagatttgaacaaagacttaaagattgccgtagccggaaccggctatgttggtttgtcaatcgccacattattggctcagcatcatcaagtaacagcagttgatgttatttctgaaaaggtggagatgctgaatcggaaacagtctccgattcaagacgagtatattgaaaaatatttggccgagaaaccgttgaatcttacagcgacattggatggtgctgcggcctatcggaatgcagattttgtcgtgattgccgctccgacaaactacgaccctgtcaagaactattttgacacaagtcatgtcgaagaggtgatcgatctggtgcttgaggttaatcctcaagctgtcatggttatcaaatcgacgattcctgtaggttactgccggagtttgtatatcaaatacatgcagaagggggtaaaacggttcaatctacttttctctcctgaattcctgcgtgagagcaaagctctctacgacaacctctatccaagtcgcattattgtgggtattccccaaatcatcgacgatgagcggttcaaggaggagaatgatgccattcgtgcaatcgccgatattcaggcgcttaaaaagtcggcccatacgtttgccgctcttctgcaggaaggggccatcaaagagaatatcgacacactgtttatgggcctgaaagaagctgaggccgtgaagctctttgccaatacctatctggcccttcgagtcagctacttcaatgaactggatacttatgcagaggtaaaaggtctggattctcaagccattatcctcggagtaggtctggatccccgtattgggactcattacaacaatccatcgttcggttatggagggtattgcctgccgaaagacactaaacaaatgctggcaaattatgcggatgtccccgagaatctgatcgaggccatcgtcgaatcgaatcgcacccgcaaggatttcattgcggatcaggttctgaaaaaggctggatattatagctactcttcgacaaatgattacaataagaagcgggagaagccaatcgtgatcggtgtatatcgcctgaccatgaaatccaatagtgacaatttccgacagagttcgattcaaggcatcatgaagcgcatcaaggccaagggcgcaacggttatcatttacgagccgaccctcgaggatggatcgacatttttcggcagcaaggtcgtcaacgatctcgagaaattcaagcaaatgagtgctgctatcatagcaaatcgctatgacgcctgcctgggcgatgtcgagacaaaagtctatacccgagatattttcagaagagattaaacagcctattatatgttaccctacaatataatactgaacggcaaaacagttctggtaactggagttgccggctttatcggatcgaatcttgccaaacggcttttgacggactatgcagaactgcaagtcatcggtatagacagcattaccgactattacgatgtctccctgaaacatgatcgactgaaaggcctggaagaatttggagatcgatttgtgttcattcacgactcgatagcaaatcgggaaatcatcatccgcttgtttgacgaatataaacctgctatcgttgtaaacctggcagcacaggcaggcgtcagatacagcattaccaatcctgatgcctacgtcgaaagtaatctcatcggcttttataacattttggaagcctgtcgacacagttacgataatgggcagacaggagttgaacatctggtttacgcctcctcatccagcgtatacggctcgaataaaaaggtaccctattcgaccgatgataaagttgataatccggtatcgttatacgccgcaaccaaaaagtcgaatgaattgttggcgcacgcgtactccaaactatataacataccttcaaccggattacgattctttacggtatatggccccgcaggacgtcctgatatggcctacttcggatttacggacaagcttgtaaaaggagagaagatacgcatctttaattacggaaactgcaagcgggatttcacctatatcgacgatattgtcgagggagtcgttcgggttatgcaacatgcaccggagcgcataactggagaagacggactgccgttgccgccttacaaagtctacaacataggcaacagccagccagagaatctgttggattttgtcgatatcctgcaacaggaattagtacgagccggagtcctgcccgcaaattatgcttttgaagcacacaaagagctcgttccgatgcagccgggagatgttcctgtaacatacgccgatacaacacctcttgagcacgactttgggttcaagccatcgacattccttaggaacggattgagagtatttgcagaatggtatgcaaagtttcacagcgataaataatcactgcctcatatcaacgacatccattctgcatctgcgcgcaatacaaacactttcaaactaaaaaagcacaatacattattttaagcactatgagtattttcaaagacaaaatcctgctaatcacaggcggtaccggaagtttcggcaatgcagttctgcgtcgttttctcgactctgatatccgggaaattcgcatcttctcccgagacgagaagaaacaggatgacatgcggcacttccttcaggcaaatcgtccggacgtttcaaacaaagtcaaattctatatcggaaatgtacgtaaccgcgaggctgtagacttcgcgatgaacggagtagattatgttttctctgcggctgcgctgaagcaggtgccctcttgcgaattctatccgatggaggctgtacgcacgaatgtagaaggcaccaataatgtacttctctccgccatcgctcacggagttaaaaatgtcgtcgtcctctctacggacaaagcagcctacccgatcaatgccatgggtatctccaaagcgatgatggaaaaggtcgccattgctcaaggacgcgctttgggtccggatgcaaaaaccaccatttgctgcacccgttatggaaatgtaatggctagccgtggttccgttattcctctttgggtagagcagatgatggaaggtaagccgatcaccatcacggatcttaacatgacccggttcatgatgacacttgatgacgctgtcgatcttgtcatgtatgcctttgagcatggcaacaacggtgacctcttcgttcaaaaggcgccggccgcaactctcgacgtacttgcagaagccctcaagcaggtttatgccaaggtggatccccaatacggagagaccgaggtgaaaatcatcggtactcgccacggcgagaaactctatgaaacgcttgtcacgcgcgaagagatgcttcgctcggaagattgcggcaactatttccgcattccttgcgacgcccgcgacctcaactacgacaaattcttcacggaaggcgatgatgccatcaaccgcatggaggactatcacagccataacaccaagaggctggatgtcgaaggcatgaaggctcttctcctcaaactcaatttcatccgcgaagacctcggcctgcagcccaaagcaaagtcccgcgattatagaagtgaataacagatgaagattctggtaaccggagcaaagggtttcgtgggtcggaacctttgctcccaacttaataacatcaaaacaggtaaggccaagtgctatggagaccttcagattgatgaagtctttgagtatgacttgaacagcaccatggagcaactggacgcatggtgctccgaatgtgattttgtattcaacctcgctggcgtaaaccggcctcagaacccggaagagttcatggccggcaatttcggctttgcctcaacgcttcttgacacgctgaagaagcatgggaacaaagcccctgtcatgctctcgagttcggcacaggcatctctttccggccgtttcggcaacagcgaatatgggcgcagcaaaaaggcgggcgaagatctctttcttcggtatggagcggaaaacggcataaaggttcttgtttaccggttccccaatctctacggaaaatggtgtcgtcctaactacaacagcgccatcgccacgttctgcaacaacattgccaacgacctgcccatcacggtcaatgatccgaaagtggagctcgaggtcctttacatcgacgaccttgttgaagagatgatcgccgctctgaaaggccaggagcaccattgcgagttcgaagggctgaccgtattgccttctgcggaaggacgttactgctactgtcccgtcactcataaggctacgctgggtgaaatcgttggccttctgcaccagttccgcgacatgccgaagacgctgatgatccccgagatcccggccgacagctttgccaagaggctttacagcacctatttgagctatcttcccaaggataaggccatttttgacctgaagatgaactgcgatgaccgcggctccttcaccgagttggtccacacgctcaactgcggacaggtaagcatcaatatcagcaaaccgggtatcaccaaaggtcagcactggcaccacaccaaatgggagcaattcatcgttgtttccggccacggcctgattcagcagcggaaagagggtacggacgaggtcatcgagttcgaagtctcgggcgacaagattcagagcgtcatcatgctgcccggatatacgcacaacatcataaacctctccaagactcaggatcttgtaactgtcatgtactgcaacgaggttttcaacccggagcggccggacactttcttcgatcccgtagcaagcgaataaaagccgcaagatggctgaataatcaaaacgatctatggaaaccaaaactccgaaattcgattacagtgacattcactggcaaaataacggcaaaatcaaactctgcatcatcgtcggcacccgcccggagatcatccggcttgctgctgtcatctccaaatgccgcaaatatttcgatgtgattctggcccataccggacagaactacgactataacctcaacggcatcttcttccgcgacctgaaactcgccgaaccggaagtctacatggatgcagtcggagatgatctcggcgcgacctgcggcaacatcatcaactgcagctacaagcttttcgctgcaaccaaaccggatgccgtactcgttcttggcgacaccaacagctgtctgagtgtcatcggggcaaaacggctccacattccgatttttcacatggaggccggcaaccgctgcaaagacgagtgcctgccggaggagacgaaccgccgcatcgtggacatcatctcggacgtcaatctcgcctactccgagcatgcaagaagataccttgctgaatgcggacttccccgtgagcgtacatacgtcaccggttctcccatggccgaggtgctccataagaaccttgccgagatccaggcatccgatgtacacgagagactcggactcaagaaggggcactacatcctgttgagtgctcaccgcgaagagaacatcgacacggagaagaacttcctctgccttttcaatgcgataaacgcaatggccgagaagtatgacatgccgattctctacagttgccatccccggagccgtcaccgccttgaggctacaggtttcaaacttgatccgcgagtacaggtccagcagccactcgggtttcacgactacaattgccttcagatgaacgcattcgctgtcgtttccgattcgggcacccttcccgaggagagttctttcttcaccagcgtaggacatccttttccggca

SEQ ID NO: 106 - DNA, 11709 bp, unidentified
  source 1..11709: mol_type = unassigned DNA
ttacttaaagagattaaccatagtcgcaatcatcgctgcaatagaagctgtcgtacttcccattcccagaatttcagtagtagtcatcttccttttctgttctttacttggaacaattatttcacaacctggttcaatggctttcttgtttcctgctcttaaacgagaaactgtaccattcatgtatattacatagaccttgcgtttcttggcgtcattaccaaagccaccagcctggttgatgtaatatttcaagctttcaccctttttatataaaactgtattcggatacattacagcaccgttgattttcactgtacttacgtactccggaacaaataatacatctccctcgcgaagcaccatatcagcatctgaaccaggatttttcaaggcctctcccagatttatacctacagaataggtatcggacaaatccaatctttttacagatatggaatctccgcctcccgcttgcgccatacgcagagcatcttccttacggcggaattcttcttcggtcatcctacgtataagacgcgctccttttatataagcatcgggagttactccaccagccttagctatcaagtcactcaaacgttcattctttttcgatagtgcataattaccgctaaaaaggacttctccgcccaccataacattctgttgtttaaaataggacggactcttacgaacataaatttcatcaaaaggctcaagatggaaatcctggcttccttctcccaccaataagccatctttcaaatcaaaagagaaattctggcctactgtagtactgaaagatgtactcttcggatctttcatgcgccgtgcaacttcaacctttgttgtagccgccgcctccaacaagccaccagcctgcaacaccaaatcctctactgtcattttatcagaataaagatatgtacccggattggcaacttcaccatgaatggtaagtgtagcttcttccttcaagtcatgaatacttggaatatataaaatgtcattcttctgcaaaggaatatctgcagccgtcccgttcagcaaacctttcacatctacttgtataacctcatgcgacaagtcttcaagttcacgatcgattatagcacggtttaagaatgcatctccgcgaagtccttccgctttcttaatcagctgcttcactgtattcatcataccgtccaactggtacaaaccttcacgatatacagcaccgcggatttccacacgattctcaaaacgctgtaaaacggaatcaaccgttatcttatcaccgtcatctacgcggaatacggaataatccatctcatccacattataaatttgatgctcacgtccacttttacggattatacgtaatgctttcttataagcatcacccgtaaaaccacctgaatacttcaataatgtacctacggtttcagtgggtttcatttcataaaacatcggacgttttaccttacctaatatctgtaccagtgactggtaaggatccacaagaattacatcaccatcctgcagacggatgtcatctttcatttttcctttcataagtaaatcgtaaacatccaaatccgctattgtatttccattgcgaatcactttaatactgcgcaaactaccaatcggattcacaccacctgcacgatataaagcatgaaatacggaagcaaatgatgagagggtataagttccgggcaccacaacttcacccataacgtttacttgaatagaacgtatttctcctaatgtcaatttaacttgggtagacggaacatttccggttactccagaatatattctggcaaattcttgtttcaaataattattggcttcctttactgttttgccactcagataaaccggtcctaaattattcacaagaatacttccttccggagagattgtttgtcgaatcgttgtttcagaagctccccacacatcaataatcacctcgtcaccaggtcccagacgataattctcgggagtagcaacattcacattgggttcgaaagtcaaattatcgttagtaaaaatattatgaccataaatttgcgaagtcggatcctctgtttccttctcttgagacaaggaacgattatccatcatttgtaaagaatcccctgcaacatccgtttgtctggcagaataagtttccgaggttgtacgcagccctttgactacgccactcatttcaccacgttgacgagaacgcttctcatcttgggtattgctctgcggacttccagatttagagttttcatactttttctgaattctttcaacttgttcctttgtcactccccgccgcattaattcagtagtaatctgcttttgatttttgcccatctgctgagcgctttttacatactgaacaacctgatcatctgacatctgctgagcaaaagctacccctgacaaagtaaataccaaaaagaatagtgttattaatctacgcataagatattctgattaatcttttgagttcttgtaataaatataaatcgggcacaaaggtaatatattatttttataatatacatttattccacctctaagtttcagaaaaagcattaaaaagctgtcactttcacgtcttttcatcgggtagaagaaagcggaaaaattggcactatttttttcattagtccaatcaaaatagcctttttttcagtataactatgttgcaccaaggccagcacttcttcccgcacatgttcataatcatcaacagatgccttttcacgctttatcttttcactgattacagaatccaaaagtccatccccaggccctcccacaatgtacacttctcccccatcccccatgactcccacttccagggtgagcatacaagcttcagacaaggtaatcaaacaatgagtattcgtcggatacacctcacccaaacgtactatgaacatatcagtttcccctttgtcgcgtttcaacctgcaatcagatgactgcacatatatttccgccacacgcttactatattccatagcattttccggatgacgtgcattagcagcagatatcataaccatacgggacactctatactttaccgccaggtctgcaatattcactgtccccgatatattcgtttgaattgcctccgacacaaaatcatccatcagttgtacatgcttataagcagcagaatgaaaaacaagttgaggacgtgtttcttcaaatatagcctccatacgcgtacggttagcaacatctgcaaccaatacacggacctccagattcttccaatgatcagacaattccaactgtacatcatacaatggggattctgcctgatctaccagaatcaactgataaggattcagtgtagccaactggcgaacgatttcccttcctacagctcccgccgctcccgtaaccattactctacgcccctcgatatgggccgtaattttacgcatgtcaacttgcaccggttctctacggagccaatcttctatttgaatgtcctttatcagtccatcgtccatacaatcgcttaagggaggaacggtcattacatgaatatcatgagagaacagtttatccagcattccggaattttccaaatccgacaccttgcttggagagataatgattgtatccactttctttttctttagacggtcaaacagctgctcatcattgggatataccctgcatcccatcgtatgtttacctatcatatcaggttcgtccgaaataaagccacgcaggcgataatgattattacgactaactctcaaggattttgcaacattgactccagtcccatggaatccataaataaaaacattcacgcaatgacgtgcatcaaaagcaatagcttcataaagcatcttcacagcaatgcgcatacaagccatcagagagaaggtgaacatatatgccataaacagaatgctgttcggcaaagtttctccaagccccgaaacagaccaacagcaattccctaaaaacaggacaacatagcttatcgtaagactccaaaacacacgataaatatctacaaaagaggaaaaacggataacacccacataagtacggagaatatgaaagaaacagatattacacaagacagcccaaatggtcagccatacatataaagaaatttcataagatacggacgaaagcctatattgcaaaaaacacgcagaaagcatggaaatcacaacgataattacatctaccaacagcaccgtccatttggacgctatgcgtgaagaaagatatttataatagattcttaaattcataatcagtatcagacttatttgctataggacctacgacaaagatgcttcttttcgttttattatccaatttttatggcaataaagttcaagacattcaaatagaaaattatcccactaaaatatttctaaaaaaaacagagattctttttgccttttcaaataaagatgtacctttgcaccccgtaaacaaaagcttattgccgctatagctcagttggtagagcaacgcattcgtaacgcgtaggtcgccagttcaagtctggctagcggctcgatattcaagcactgattatctggaataatcagtgctttttcttttcaagaatcgttagaataaaaaacgctcttctacgaatatatttgcataaaacacaatgcccttccaaacagtttaatccatagccgcataattatcccaaagcaagtaaagctagtttaaaacagcaccatctgattacaatgataacttgaaacatataggtacattattaaaagcataatacaccttatattatacatagtaatccccaatatttgcggcaacttttcaataacccaatttttcaatcttaaataaaggattgaggtgattgaagaacacaagccaaaatcaaaaggctaccataggtttctataacatactataaacaaatgaaaagaatcaaattatttacagcggctttgctgctggcggctatatccgcaggaaacgatgtgtgggcgctttccgattcaggaaagaaagacacgcgtccgatagaatcacccaaattcttcagtggaaacgcccacccgctgcttccacctccttcaattcagactctttgcagactgtctctacaaagatagacacagacaaagacggcattcacgacctttatttcgtgtttaaaggcaaggagctgaaggtagatgaatggatgtttgagagattttgagttagccttactgtgctttatttccacatttactaagaattattcgtccgacatctgttgcattatcgtccgacagctgtcggacgataatgcaacagatgtcggacgaataattcttagtaaatgtggaaataaagcacagtaaggctaactcaaaatctctcaaacatccattcatctaccttcagctccttgcctttaaacacgaaataaaggtcgtgaatgccgtctttgtctgtgtctatctttgtagagacagtctgcaaagagtctgaattgaaggaggtggaagcagcgggtgggcgtttccactgaagaatttgggtgattctatcggacgcgtgtctttctttcctgaatcggaaagcgcccacacatcgtttcctgcggatatagccgccagcagcaaagccgctgtaaataatttgattcttttcatttgtttatagtatgttatagaaacctatggtagccttttgattttggcttgtgttcttcaatcacctcaatcctttatttaagattgaaaaattgggttattgaaaagttgccgcaaatattggggattactatgtataatataaggtgtattatgcttttaataatgtacctatatgtttcaagttatcattgtaatcagatggtgctgttttaaactagctttacttgctttgggataattatgcggctatggattaaactgtttggaagggcattgtgttttatgcaaatatattcgtagaagagcgttttttattctaacgattcttgaaaagaaaaagcactgattattccagataatcagtgcttgaatatcgagccgctagccagacttgaactggcgacctacgcgttacgaatgcgttgctctaccaactgagctatagcggcaataagcttttgtttacggggtgcaaaggtacatctttatttgaaaaggcaaaaagaatctctgttttttttagaaatattttagtgggataattttctatttgaatgtcttgaactttattgccataaaaattggataataaaacgaaaagaagcatctttgtcgtaggtcctatagcaaataagtctgatactgattatgaatttaagaatctattataaatatctttcttcacgcatagcgtccaaatggacggtgctgttggtagatgtaattatcgttgtgatttccatgctttctgcgtgttttttgcaatataggctttcgtccgtatcttatgaaatttctttatatgtatggctgaccatttgggctgtcttgtgtaatatctgtttctttcatattctccgtacttatgtgggtgttatccgtttttcctcttttgtagatatttatcgtgtgttttggagtcttacgataagctatgttgtcctgtttttagggaattgctgttggtctgtttcggggcttggagaaactttgccgaacagcattctgtttatggcatatatgttcaccttctctctgatggcttgtatgcgcattgctgtgaagatgctttatgaagctattgcttttgatgcacgtcattgcgtgaatgtttttatttatggattccatgggactggagtcaatgttgcaaaatccttgagagttagtcgtaataatcattatcgcctgcgtggctttatttcggacgaacctgatatgataggtaaacatacgatgggatgcagggtatatcccaatgatgagcagctgtttgaccgtctaaagaaaaagaaagtggatacaatcattatctctccaagcaaggtgtcggatttggaaaattccggaatgctggataaactgttctctcatgatattcatgtaatgaccgttcctcccttaagcgattgtatggacgatggactgataaaggacattcaaatagaagattggctccgtagagaaccggtgcaagttgacatgcgtaaaattacggcccatatcgaggggcgtagagtaatggttacgggagcggcgggagctgtaggaagggaaatcgttcgccagttggctacactgaatccttatcagttgattctggtagatcaggcagaatccccattgtatgatgtacagttggaattgtctgatcattggaagaatctggaggtccgtgtattggttgcagatgttgctaaccgtacgcgtatggaggctatatttgaagaaacacgtcctcaacttgtttttcattctgctgcttataagcatgtacaactgatggatgattttgtgtcggaggcaattcaaacgaatatatcggggacagtgaatattgcagacctggcggtaaagtatagagtgtcccgtatggttatgatatctgctgctaatgcacgtcatccggaaaatgctatggaatatagtaagcgtgtggcggaaatatatgtgcagtcatctgattgcaggttgaaacgcgacaaaggggaaactgatatgttcatagtacgtttgggtgaggtgtatccgacgaatactcattgtttgattaccttgtctgaagcttgtatgctcaccctggaagtgggagtcatgggggatgggggagaagtgtacattgtgggagggcctggggatggacttttggattctgtaatcagtgaaaagataaagcgtgaaaaggcatctgttgatgattatgaacatgtgcgggaagaagtgctggccttggtgcaacatagttatactgaaaaaaaggctattttgattggactaatgaaaaaaatagtgccaatttttccgctttcttctacccgatgaaaagacgtgaaagtgacagctttttaatgctttttctgaaacttagaggtggaataaatgtatattataaaaataatatattacctttgtgcccgatttatatttattacaagaactcaaaagattaatcagaatatcttatgcgtagattaataacactattctttttggtatttactttgtcaggggtagcttttgctcagcagatgtcagatgatcaggttgttcagtatgtaaaaagcgctcagcagatgggcaaaaatcaaaagcagattactactgaattaatgcggcggggagtgacaaaggaacaagttgaaagaattcagaaaaagtatgaaaactctaaatctggaagtccgcagagcaatacccaagatgagaagcgttctcgtcaacgtggtgaaatgagtggcgtagtcaaagggctgcgtacaacctcggaaacttattctgccagacaaacggatgttgcaggggattctttacaaatgatggataatcgttccttgtctcaagagaaggaaacagaggatccgacttcgcaaatttatggtcataatatttttactaacgataatttgactttcgaacccaatgtgaatgttgctactcccgagaattatcgtctgggacctggtgacgaggtgattattgatgtgtggggagcttctgaaacaacgattcgacaaacaatctctccggaaggaagtattcttgtgaataatttaggaccggtttatctgagtggcaaaacagtaaaggaagccaataattatttgaaacaagaatttgccagaatatattctggagtaaccggaaatgttccgtctacccaagttaaattgacattaggagaaatacgttctattcaagtaaacgttatgggtgaagttgtggtgcccggaacttataccctctcatcatttgcttccgtatttcatgctttatatcgtgcaggtggtgtgaatccgattggtagtttgcgcagtattaaagtgattcgcaatggaaatacaatagcggatttggatgtttacgatttacttatgaaaggaaaaatgaaagatgacatccgtctgcaggatggtgatgtaattcttgtggatccttaccagtcactggtacagatattaggtaaggtaaaacgtccgatgttttatgaaatgaaacccactgaaaccgtaggtacattattgaagtattcaggtggttttacgggtgatgcttataagaaagcattacgtataatccgtaaaagtggacgtgagcatcaaatttataatgtggatgagatggattattccgtattccgcgtagatgacggtgataagataacggttgattccgttttacagcgttttgagaatcgtgtggaaatccgcggtgctgtatatcgtgaaggtttgtaccagttggacggtatgatgaatacagtgaagcagctgattaagaaagcggaaggacttcgcggagatgcattcttaaaccgtgctataatcgatcgtgaacttgaagacttgtcgcatgaggttatacaagtagatgtgaaaggtttgctgaacgggacggctgcagatattcctttgcagaagaatgacattttatatattccaagtattcatgacttgaaggaagaagctacacttaccattcatggtgaagttgccaatccgggtacatatctttattctgataaaatgacagtagaggatttggtgttgcaggctggtggcttgttggaggcggcggctacaacaaaggttgaagttgcacggcgcatgaaagatccgaagagtacatctttcagtactacagtaggccagaatttctcttttgatttgaaagatggcttattggtgggagaaggaagccaggatttccatcttgagccttttgatgaaatttatgttcgtaagagtccgtcctattttaaacaacagaatgttatggtgggcggagaagtcctttttagcggtaattatgcactatcgaaaaagaatgaacgtttgagtgacttgatagctaaggctggtggagtaactcccgatgcttatataaaaggagcgcgtcttatacgtaggatgaccgaagaagaattccgccgtaaggaagatgctctgcgtatggcgcaagcgggaggcggagattccatatctgtaaaaagattggatttgtccgatacctattctgtaggtataaatctgggagaggccttgaaaaatcctggttcagatgctgatatggtgcttcgcgagggagatgtattatttgttccggagtacgtaagtacagtgaaaatcaacggtgctgtaatgtatccgaatacagttttatataaaaagggtgaaagcttgaaatattacatcaaccaggctggtggctttggtaatgacgccaagaaacgcaaggtctatgtaatatacatgaatggtacagtttctcgtttaagagcaggaaacaagaaagccattgaaccaggttgtgaaataattgttccaagtaaagaacagaaaaggaagatgactactactgaaattctgggaatgggaagtacgacagcttctattgcagcgatgattgcgactatggttaatctctttaagtaatttgaattatgagcgaagaaagaatacaaaacataacttctccacaaccagaggaacaagaaatagatttgatagaactggcccagaaagtatgggctagtcgcaaattggtttttaaggcgtgtggtatcgctgcccttgttggactggttgttgcatttagtattcctaaggagtactctacaagtgtgacgttggctccggagagtggtggcaaatctggtggtggaagtatgggagcccttgcagccatggcgggtatcaatttgggtacttcttctggtgaagatgctttgtcacccgaactttatcctgatattgtaagttctactccttttctgattgaactgttcgatgttaaagtcaaggatcagaaagcaaaagtagacacgactttatatgcttatttgaaagaagaacagcgttctccttggtggagtgcaattttctccgctccttttaaggtgttaggatggacattgtctttgtttaaggatgaaccggaagagggggatgcaaagctggatccttttcgtcttactagagatgagtctgccattgcagatgctttaagtaaacgtatctctgtttccgtagacaaaaagacaggtgtgacaaccttgtctgttactatgcaggatcctttgatatctgcttcgctgacggataccgtgatgcattgcctgcagaactacatcacagattatcgaactaataaagctcgtcatgatttggcatttaccgaaaaactttatggagaagcaaaggccagttatgagtctgcccagaagaaatacgcaaattttgtagatgcaaaccagaatataatattgctgagttatcgcgcagagcaagagcgtttacagaatgaaatgaatttagcctatcaagtatatacacaagtgtctcaacaattgcagatggcaagagctaaggtgcaggagattacaccggtatatacggttgtccagccggctacggtacctttgaagcctgcaaagcccaataaattgatgattttgatcggcttcatgttcttagctggtgtcggcagtgtgggatggatattatttgtaaaagatttattaaagggatggaaaaagcaaacaatatga

SEQ ID NO: 107 - DNA, 8689 bp, unidentified
  source 1..8689: mol_type = unassigned DNA
ttgataaccaaagcaaatttccagagaagatggagagtttgtccggacagtcaaaattttctctggaaaattgacaacaaacaattagaaaagacaaaaacgatagactacaggggtttccaaataacaaatagtgaaggagcgattcttatggaggaaaagaaatacttaaaatggtacaacaagataggatacggatctggtgatattgcgggaaatgtagtgtatgcattcctgacatcatttgtgatggtatatttgacagatacgattggattggcatccggtatagtgggaacactgattgccgtttccaaattactcgatggatttacagacatcttttttggatcaatgattgataagacgcatagtaagatgggaaaggcaagaccatggatgctgtatggttacattggttgtgcaatcacattggtagcctgttttgcagttccaacaagtcttggcaggacggcacagtatgcgtggttctttattgcgtatacgctgttgaatggcgtgttttatacggcaaataacattgcttattctgctctgacatcacttgtcaccaagaacagtaaagagcgtgtgcagatgggttcttaccgtttcatttttgctttttcaaccagtcttctgattcaggcagttactgttggatttgttgcaaaatgtggtggagatgcagccgcatggcgtatggttgcaattatttatgcagtgatcggattggttgtgaatactatttccgcattatctgtcaaagaacttccggaagaggaattaaatgaaggagacacaacaggtgaagaggaaaaatatgggctggttcaggcattcaagctgctggtaaagaataaattttatctgatgatctgtggtacttatattttacagcagttatatagtgcaatgatcggtgccggtatttattatatgacctgggttttgaaaaacaaaaatctgtttggacaatttgcctgggcggtaaacattcctcttatcattgcattaatctttacaccaacgctggttggcaaatggaagggtatgtataagctgaacttgagaggttacatccttgctgtgattggcagagctcttgttgttgttgccggatatatgggaagtattcctttgatgatggcatttacagcattagcagcattaggacagggaccttggcagggagacatgaatgcagtgatcgcatcttgttccgagtatacatacctgacacagggaaagcgtgtggatggtacgatgtattcctgtacttcacttggcgttaagattggcggaggtattggaacagcagttgtaggatggctcttagaacttagcggatatgtaggaactcatgctgtgcagccacagtctgcactgaatatgatgcagtttatgtatctctggctgccgctgatctttgatgtgcttattatgtttattctttccagaatgaatgtagaagagacaaatgcaaagatcaaaaaagaaaaaggaattacagtagaagctgctcagcagtaatgagcagaaattggtaacaggaaagcattgtcttaattgaataaacaattacaggcaatgctttttgttccgtaaagaaaaggaggaatggttatgggtagcattttagtattaggtggagccggatatataggttcccacacagtttatgaattgatcgaagcaggaaatgatgtagtagttgtagataatcttgagacgggatttcgtgcagcggttcatccggaggctaagttctatgagggggacatccgaaatcgcacttttatagattccgtgtttgataaagaaaatatagatggagttatccactttgcggcaaattcgcaggtgggtgaaagcatgataaagccgctgaaatattataataacaatctgtgtggtacggagatactgcttgagagtatggttgcacatggcgtggacaagattgtattttcttctacggcagcaacttatggagaaccggaacgcattccgattatggagacagaccgtacccttccgacaaattgttacggcgaaacaaagctgtctatggaaaaaatgttcaaatggacagcatctgcacatgatcttagatatgtttctttgagatattttaatgcctgtggtgctcatccaaatggaaagataggagaagcacataatccggaaacgcatcttattcctttgattctgcaggtgccgaacggaaagagagagtatatttccatctttggaaacgattatgatacgaaagatggtacttgtgtcagagattatattcatgtaaatgatctggcgcaggcacacattcttgctatgaaatatcttcgtgatggaaatgacagcaatatattcaatcttggtaatggagtgggatttactgtaaaagaggttgtagaaactgcaagaaaagtaaccggtcatccgattccggcaaaagaagaacctcgtcggtcaggagatccatctatgctgatcgcttccagtgcgaaagcaaaggaagtgttgggatggaatccacaatatgcagatttggaaacaattatagatacagcatggaactggcataaaaatcatcccaatggataccagaatgtgtaagggggggaagtgccatgataaatgagtgtatcaatgaacttgttgcgtatggattaaagaggggcttagttgatcctgcagatgaagtatatgtaacgaaccgtttattggaactgttccgtttaacggaacacgatggagtggtagaacaggttcagccgagaaaactgtcacagattttaaatgatatgttggaatacgcataccaacaggggatgctggaagaacagacagtcacagaaaaagatctgtttgatacaaagattatgggagaattaacgcctccaccatcggtagtccgcaggcagttttttgaaaagtataatatttcaccaaaaactgccacagatttttattatcaatttagccaggcaacaaattacattagaaccgaccggatcgcaaaagacgaaaaatgggcggcagatacagaattcagcgatttttggactgcatataaaaaaaggaccatttcacatttgtgaagtggtctgctttttcagtattcagttttcacaaatagtccttttagccggattatgcatgatatacatgctcaaagtatccttcatagaaggctaaaaggttgttcatataatttttgaatctgctcattttgtattcctcctttccttgtttgcaagttcattataggacaggctggataagaatgcttgccaaattaaaagaaaatgtagacaaatgttgcagaggaaatcaacaattaagtaataaaggggagatatatcaatgcatttgacgtttaaggaaacaaaggaagaggtatatgcggcgcaaagagtgtcaaaacatgtatctccacatttacataatgcattggagattgtgtgtgtaacggaaggaacacttgagatgggagtggggcaggaattatatcatatggaaaagggtgatatcggatttgtcttttctgatattattcatcattatcaagtgttttcagaaaaaacgagccgggcggattatatcttggttccgtcttcttttgcaggagtatttaaagataaaatacaaggatatgctcctaaatatccggttattcgtgcggggcagattgaaccagatgtttatcatgcaattcaggcgattatccaaatggaagaaaacgaacctatgattgttcaagcttatgttcaaattgtgctggcaagatgtataggaaaaatggaattggtggaaaaaagttgcgtggggagtgatgatttgatatacagaacagtatcttatgtgtcggggaattttaggaaaaaattttctctagaggagatggcacatgatcttggagtaagtaagtatgtcttgtcacgagtattttctaaaacatttcatcgtaatttcaatcagtatcttaatgatgccagattgagctatgcatgtacaagattggtaaataccagtgatacgatcctgaatatctgtctggacagcggttttgacagtcagagaacatttaacagagtgtttaaagaacgctataaaaccgcaccaagtgaatatcggaaaaacaaaagacgaaatgcgatatcttccggaagaataccgagaaaggttgatcggttatcttaggtgcctgcgggatgatatgaaaaaataataaaaatgtaaccttttgtttcaaattgctgtcataatatatagcgcgcaaaaaaaacttattgcagtaggaaggaagcaggaaaatgaaggaacaaaagaaaaaacggcacatagaagggatggatgcgttaaggggttttgctatattgggagttgtcctttaccatgtaatgccggggcggtttccgggcggctttctcggagtcaatatgtttttagtactgtccggatatctgatctataaaacatctgtatgggacctggaacatgggaaatatgcagcaggcagattttataaaaagcgttgcataaggatttatcctcctctgctcattatgatcattgcagtgtggggcattctggcggtcagtatgccggaggtggcaaagggcaagggcggtgaggttttaagcgttgttgggggatataataatttctggcagatccggcagaatgcatcttattttgcaaggatgagccagcagtcaccatacacacatctgtgggcgattgccatagaaatgcagttttatcttatgtggccgctgttgttttggcttcttcggaaactgaagaagcatacatccatgacggttgccagaacagctgtgcttgttctggtgattcttggtggacttcgtatgagcattgtctatcgtccgacagaggatgtatcaaggctttattatgggacagatacaagaatatatgccctgtttttgggaatgtttattgcaatgattcagaaggatgtgatatcctttgtacaaagaaggctgccgtcatggtttataaacagcctgacagcagcagggctcgtggtgatgacgggagcctatttcatagcggaagggcagatgccgtatatataccaagggggaatgtttgcagatgggatactttgtgcactgattcttttgctgattccggcgggaagtacgggggaatggctagacaaaagtccctttgccttagtaggaagaataagttatgagctttatctgtggatgtatccgatcatttttctgtttgggtattataagaaaaactttggtccggtatcctggtgtgtacagatgatactgatggtttttgcggcatctgcgatgcatggactgatggtattttttcaatataagaaaaaacagaacccgaaggggaatggtgttgtcataggttataccagtaccggattctctgtagcctgtattgtactggctgtctgtgtaatcactgcgtatcagctgccgggggaagctgcgaaggatactgccgtaaaagcacaggcaatggcacagcaacaacacaggagaatttctgacgagggaaaagcttcaaaagagaaagcaccggctgccggggaaacagaaaagataaaaaaggctcccttagagaaaacggatcaagatgacaatgccggcatccgtgggcagagtattaccgcaattggtgattccgttctgcttggtgcttccggggaagtaaagaaaaagctgccggactgtctgattgatgccaaggtatccagacaggttattcaggcgaaggatattgttaaagacctgaaatcaaaagggaaattaggagatacggtcgtgcttgcgctgggaacgaacggaaccttttcggatgctaccggcaaagagctgatccgtgcgattggaaaggatcggcagatttattgggtcacagccttcggggagcatttgcagtggcaggaagaggctaatcaccagatccgatccatggcagagcaataccaaaatgtgcagattattgactgggcatctcttgcagaagggcacccaaagtggtttgtatccgatggagtacatctgacctcttccggatgcaaagcctatgcaaaactatattatgatgcaatcgacaacaacagccggaaatgcattacaaagaatcaggaggagtagacctgcagtggcaaaaggaggaaaaaatggcagaatcatcatacaattcaaagggggaacaaatggcatgggatgaccgggagattattgcgcaatttctgtgccgtgatgaggctgccattaaaaatactgcggacaagtatgaaagatattgcagttccattgcctatcgtattttaggaaatggagaggatgtcagggagtgcttgaatgatacctggctgaagttgtgggagtccattccgccgacagtacctgagattttgtcggcatatgtgggcaaaataaccagaaatctggcaatcaaccgatatgatcatctgcatgccggaaaacgctgtggggacagtgtggatcagtcgttggaggaattaaaggagtgtgcatcgttggcgcatgataatgtgagagaggaaatggaccggagggatcttgaggaagcaatcaaccggtatctggacggactgccgtcaaaaaaacgacagatctttgtccgaaggtatttttatctggatgagatataccagattgcagagcattttcatatgacggagtccgcagtcaaggtgggattgcaccgtatgcggaagtccttaaagatacatttgcaaaaggaaggatatcatatttagaaacaagcctgtgaaaaaatcagggctgaattaagaaatgaggtaatagttatgtcaaagaaaaagatattgtgttatgttttattgactgcaatgttagtcagtatgtttgcggcaggagaggtgtctgtggcggcagaacaacagaagccggcatattccaatcttgcagatacaaagtcgcgaaaagaagtaaggagtgctcttttgtcagcggggatctccgccaaaacaacagatgcctggctgaaggatgtcgtaagctacaataaaaccatccaaaataccagtctggtaaaaaaaggcttcaaaaagatggggaaaaagccaccggtatataatgaaaaccggatcagtaagctctggctgaagaagaataaactgtttatcggttataactgcaggatcactgcctatgatctgatgaaggactatattaaggtcggcaataccggaaaagcgaatccgtcgcagctgtttatggatcaggatgcgttaaagaatgcaccaacgaagaagttttcaggaaagcagagaaaagcatttgagagtatattctctacggtgcagacgaaatatacgaagaatgtggcaacacatgcagcaatttgggcaaaggattggaaaaacaaaaagatttctgtttccggcaagacaaaggcaactctgatcagcgtcgttttgcattccagttttagcaaaacggaaaatgaactgtttgtgggtcataccggcgtgctggtgccgacaaagaatcataaatatctgtttattgaaaagctgtcattccaacttccttatcaggtaacccgttttgaaagcaaagaacagctgaatgattatctgatgggaatgtatgacacggaatgggggcaggatacggcaaagccatttattatggaaaatacaaagctgatgaaggaatatcatgcagtgtctgaccgatagaacggatagtaacgaattttcaaatgcatggaatggaggaatcagatgagccgaaggatcaaaaatacaatcagcagcaaggaactgctgcaggcaatgggaggaatacgggactgctatgtgaaggaggcagattatgctgcttgtgctgtcacgaagaaacaacctcacagatggtatgttgctgccggtatggcagccatgctagcattgagtattctccttccaaatcttaataaagcaacggcttatgccatgcagagtctgccggtgataggagaatactttaagctggttacattccgggaataccggtttgatgatggaaggcatagtgcagacgtaaaatggaataaaatctatgcagatagggcagggatggatgactccgaggaaaccggaaaacaggcgcacaaatcagtcaaagagatcaatgcgcagatggagcaaaagaccgagaagctgctcaaagaatttaagaagcaggtcggggcgttgggctactcctctctgaccgtggatagcaaggtggtcacgaactcttcgaaatattattgtgttatgctgtctgcgttctcctcccaggcagatggataccaggcggatgccttctatacgatagaaaagagtaccggaaacctgctggaattatcgaatctgttcccggagaatgcggattatgtagatgtacttacggcacagatcaagaaacagatgcgccaaaatatgaaaaaggatgaaaataatgtgtattttctggatacagatacaccagtagcattgtttgacaagattgatgaaaaccaacagttttatatcaatggaaaaggtgaaatagtgatctgctttgcagagggggatgtagcaccggcttccatgggaacacttcattttgttatcccacaaaaagtggtgaaagaacttcaaaaaaatgaatga

SEQ ID NO: 108 - DNA, 9079 bp, unidentified
  source 1..9079: mol_type = unassigned DNA
tcaaaatgtaatattgagtccaaatgtataaatcgcaggtaccggataacttccattatccacaccaaaagcaatggcagaaccaccaaactcaggggtgtagccggtattatgtttccaagttttcaggttctgaatattgaaataggctttcaaagccttcaaaccgattttggatatcagggccttatcaaaagtatagcccaattgcaggttacgtatacggaagaaactgccgtcttctacataatactccgaattttcaaagttaatggcatgaccggtatttaggacaggttgtgtattggatgtaccttcgccgtgccaacggtccagacgctgctccatatagttgaactgcgcccaattgtaattgtcccaagtacggtaaatctgattaccgccctgtcccatcatgtcaatacccagttcccaacctttataggaaacacctaatgagattccataggtaacatccggagtaggatcaccaatcaaagtacggtctgccggtgtaatctcaccatccccattcacatcggcgaacttcaaatcaccgggagtcactgtagccaatgtattcttgggcgaagcatcaatatcggcctgtgactgataaacaccatctaccttatatccatagaagaaaccgatgggataacccgccatagtatagctctggctcttgtctccggcaataatggaatagccgtcttgtaccagactcttcaccttattcttgatagtagtcaggttgactcccacattatacccccaatcgccaatctgatcccgccaagtggcagacaattccacccctttattctctatctgtcccagattcccaattcctggaacggttccggaaagtccgggaacctttgccagcaggtctttcgtattctttttataataaactccttccacatgcaggcggttgcgaaacatattcgattcaaagcctgcttcccaagcttccactttttcccatctaaggttcgcattaggcaaataggccaactgatagcccggatagatggtggacggattgccaaacacagctccaaaagcattttcaagcaacggctcagccggataagcagtatccagattctgattgcccaacgtaccccaggaacctttcaacttcaacatatccaaccaagaaatgtctttcataaactcttcttcggtcatcagccatccggcacctgccgagtaaaagttctgccattggttgcccgtatacgaaaaagccgaagaaccgtcccgacgaaaagacccgttgaacaaatattttcctttgtaattataaatcacacgccccagaaaagaaacagtagtacgttcccactgtgtacttccattggtagctgtggccaaatcaccaatactgacgaaccatttatcgggattatcaggaataaccaatccaataccttgcccacgggcggcatccagacggctgagagaattgtaataagtagtgaaaccggcggttgccgtcagattatggtcgccaaaactatttgtataagtcagcacataatcactttgcaccttcgtttcattttccttgaactggctcacttcagtcttacccgttcccagtgtagccacatttcctttcactgtgttatcatataccttgataatcggctgataggtacgcccgttattcgagccgtaatccatagagaacacagccctgaaattaaaatgttccagaaaatccacctctccataaatgttacccgatgcacgataattctctgcgcgagtggtgttggcttttaaatccacatccaccatcggattcatcatctgtgctttctgaaactccggcaacgccgcatacaactgatattcttcattgaatacaggagctataggagtggtacggacagcattcaggactgatttactatcagcaggcagcatacgtgctccgttaaactgaaacccgacctttatcttgtcggttatcttatactcattactggcattcaaggtgattttgctgaacttctcgtgctttatatttccttgttcgtatgagtatcccatccccagataaaaactatgtttctcagaagctcctgtcacactgatattattattggtaatgaaaccattctgaagcacttcatcctgccagtcggtatcagcgttccagccggaaaaatcaaaagcgggattcttttcattaacaagctgctcactatacaattctttgaactgagaagcattcaccatcttgattctgtccaccacatgtttccagccgaatgaggtgttgatattcaccaaagtctgcccctccttagccttctttgtagtgataatgataaccccattagctccacgcacaccgaaaatagccaatgaagacgggtctttcaacacttccatagactcaatatcctcgggattcagaaagttaatgttatcattgaacaagccgtcgacaatgtaaagaggtttgtagccgttaatggagttcgttccacgtacacggatttcggggtccgagcctgcttgtcccgagttgataatctgcacaccggctacctttccctgcaaggaagacaagggatttgtagaaggtttattagcgatttcggctcccttgatattcgtgatagagccggtcaagtcacgcttcttcgcactaccgtaacctatcactactgtttcagccagcatttgtgagtcctctttcagctgtatatttatcacatgctggctgcctactgtcacatcttgcttcaccattcccacgtacgagaattccagtacattgtcgggtgaggcggtaatactgtacttcccatctatgtcggtaatcgtaccattggaagtaccttgaatcactacggatgctccaatcagaggttcattggtcgaatcggttaccgttccggtcactgtcttctcctgagcaaacagcgacgtagtcatcaacagcagacagactaaagcactaaaagtcctcaatccctgccgcccatgttgtaaaggtttaggtttattgtccattgcattttctattaacaaataaataactagtttaatttcttatattgcaatgaaacaaaaggaaccggaaaaagatgtttaagacgagagaattaacactttaacatcccatgaaaaaaagttacccgaagagcatgtgctcctcggataacttttattattcttatatcaccattctatggtacatggaccaccaagggattacgtaccttctgagcgtattcttccaaatatttgttccaatcggtatcggcttcgaaaccatatttgctccagcctgatccccaataataaatatactcggaacccggttcataatcactgaccgacaacacatgccccaaagcacctccacgttctttctgctctttttcggagaacatttggggcagcgctccttttatattagccggaaatacagcacctatataaatcactccattgttattggctgcattctctgtagagtccgcataggctatataacctgcatttgcatcaaaactataccccgtaggattctgtttgtgcaatacaatgccggtcaccaccggagttgtttcctgcaaattatcaaaagaaaccacagtcttgttcaactgcgatcccttgtccaaagaaatgatacgcgtttctatcacatttgaatctctttttacaaccaacggattataaactaacttggtggtgaatcgaagcggaccgttatccaagacttcacaatccttgtaacaatagggataaacaatggtactatcggggaataaagctgctgttccgccacccagagtcggacccaccgcataacaatccattccgtttccatgatctatgtgataagagattccttgattcaaatcaccgtcataacgatcttccaccaccggttcgggtacattcttggtccagatgtcataaccaaaggcacgctcgcccttctcctgcaaagcaggaccgtatgcacgataagcggcgcgatcgttttcccatgccacatcatccagacgctcgggatattgacgcccacaagcaaccacatccaccggctgtggagttccttctgcaatcgtataagtaaccgaagcttcccctttcaccgaagcaggaaagataagcatatcatcgtatgttatctgataaggcacttcaaggccgttctcgtccaatacgataacttgtgccgtatcgggtaattgtagtttgcctgttatttcagccatagagatttccaccatttctccattcctatcaatagaaagcggattggttactgtaacaatcaccggctccttctgcgaacaggagaacatagtcaacaccgttgcaactgctaaaaagatctttttcatactatttatttcttgtcaaaccgaaaggcaaaaatacaaagaatctgcaagcatcaacaaagacacaagcagattcttcctattttatatcaacaaattatttaggctgtttaccaatgtaagccaaaataccaccatctacatagagaatatggccattcactgcattagaagcttcggatgcaaggaatacagcaggaccagtcaattcctgcggatccaaccagcggccggccggagtcttggcacagatgaatgtatcaaacggatgacggcttccatcgggctggatttcacgtaacggagcagtctgcggagtagcgatatagcccggaccgataccattacactgaatattgtattctccgtattcagaacagatgttacgagtcaacatcttcaaaccacctttagcggcagcgtatgcagaaacggtttcacgacccaactcagacatcatagagcagatattgatgattttaccatgtcctttttccatcatcgcaggcaaaacagctttagaaacaatgaacggagcattcaagtcaatatcaataacacggcggaaatcggcagcttccatttcgtgcatcggaacgcgacggataataccggcattgtttacaagaatatcaattgtacctacttcctttgcgatagtggcaaccatagcctgtacggcaggctcgtcagtaacatcacatacatatccgtgtgctttaattcctttttcagcgtaagaagccaaacctttatccaccaattcctgattgatgtcgttgaaacagatggttgcaccttgttctgcaaaagcagatgcaatagcaaaaccgataccataagaagcgcctgttacaagggcgactttaccttccaaagaaaaattcaaatactgattcatgatacttatattattaaattaatgaagttatattatttatttcaagtctgtaatcaatgagaagtcttgatcaccataatccaaattctctccacccataccccaaataaaggtgtaattgtgtgttgccgccgcactatgaatagaccattcgggagacaagactgcctgatcgcctttcatccatatatgacgtgtttcatccacttctcccataaaatgacaaacagcgtgttcatcaggcacttcaaaataaaaataagcttccatacgacggctgtgcacgtgtgccggcatggtattccacacacttcccggtttcagttcggtcatccccatctgcaactggcaggtaggcaatacctgacttaccagcatcttgttgatgcaacgatgattggaaccttccagtgaacccatttcagcaacgatggcatctgccttggtcacttttttatcgggatagttacgatgagcggtaacagagttaaaatagaatttggcaggatttccggcatctttactttcaaaagtcacttcccggtctcccgaacccagataaagcgcttctttataatccagttcgaacacggcatttccagctttgaccacaccgggaccgcccacattaaaaatacccatttcacgtcgggaaagaaagtaagatgctttcagcggatcaatggcctccagttttaatatctctcccaccggtttggctcctcctacaaccatacggtcatacatggagtaaaccatgttcacctcattgtccgaaaatactttttctattaagaaatcccgtcgtatcctttgagtgccatagcttttggcatcttcgggatgcgcggcataacggatttcataatttgtcttcataagcagctattttatgtttttatagtattccgaattatttcgacttgggcaaagttacgaaacaatcttgtttcgatgctgcaaaaatcgttcagaataggtataaattttgtcctattatatgcaaaatctgctacttaatacgtttcagaacactcaaaaactcaaaatcaacgagataaaatatcacaaaacttatcttgaaacgcacgcgcccggcttaatttcagtacgttttggttaatgataacaaaggccaattgatgtccattagcagcttttacataccctgccagtgaactgaccccggttacagaaccggtttttgcatgcacatttccccgagccttggtctgtttcatccgattttgtaaagtaccgtccactcctgctatgggcagagactcatagaaaggaagaaaaacttcccgatgataataggcatacttcaaatactccaatagtaaacgtggagagatataattataaacggaaacaccgctaccgtccgctatcttatagttctccggattaaaccctaaagctgttttcataaaggcgtgaatggcatcggttccatcttctcctgtcacccgtctatgcagggaacgcttggcagccaaatgataaaacattgattcggcacacaggttatcacttttcttcaaagctctttccaacacttccttgagtggtcttcggacggtataaagcgtaactatactgtcggccgttacaggacaatcggcatacgtgcaggttcgcgcttcaattcctttgctgcgcaaacggctgacaaaggtatgaaaaaagaaatctttggaagtatatacattcaatttctcagtatagggataagaaacattcccggaaacggtaatgatattgccattgctgagccagttacgagtgattttcagctttccggcttgcggattacggctcaccccgtgattatgaacctgataataatcggaaaccggcgtacaaactactttgggcaacgagtctttctgagcaggagaaaccgatacatccacgcagcccctattcagcatgagaggggaaagatagggctggaaggaataaggagtatcgtcccaacaccaaccggaaccccaataaaccgagtctgtcatggaaacatccgccgcaagagtatctgtcacataacggatgcctttacttgccaatgcatctaccagacggtccagatcctcgtccataaattccggatcaaaaccgcctatcagatacaagctgcctttcaacgtgtcattttctatttttccacgataacgaagaccggtatccatggtataatctgctcccagttgtaccaaggcggtaaccgaagtgattattttctcaacagaagcaggccggtacagtttatcgtcctggtaacggtaaacggattctccggcggtcaaatcaaatacggcaatacccacttcggatgttttcagaacttcttcatgcagtaaagcgtccagccgctgagatagcggctgggcgtttatgaagtgaatagataaaatcagtaaaaagaaaaataaaactcgtttcattatagttccctgaatatctcacccacagtaggatgaggaaatacatatcgtttccaatcctctatggtcttaccatcctcaatagccatacctgccaatacaatcagctcggaagcaggattacccaacatgtgcgctcccaatacagtaccgtcttcggctgtcaaaactttgcagacgccgttcactccttcattctcggctacaaaacgcccggagtaagccatcggcaacttaacggctcgataaggaatacctgcggcctgcaaagcttcctcgctcatacctaccccggcaatctcgggatttatatagaccacacccggtatggcacgataactcatcgcatcttccttacctgtaatatgatggacagccacttccgcttcacgcacggcggtatgtgccaacaaagagactccgttcaaatcaccgcatacatagacaccggggacagaagattgcaaatgttcatctactttgatgcatctgcgctccgtccattccaaattcagattttccaatccgaaaccttttgtcaccggacgacggcccacactcatcaataacttatcagctgtaacagttcctgttccatctgcattttcatatgacacagtaataccggtttcctctttggacacccctactactttcgtactgagcaggaacttgattccttttttggcatattcagcccggagcatagccgacagctctttatccatgccacccaggatctcatccaacatttcgacaactgtcacctgtactcccaaactggtaaagaaagaagcaaattccataccgatcactccaccgccgacaatagtcaatgaagcaggtacttctttattatccagtgcatcacggtgtgtccagtaatccacattttccactcccggaataggaggaataaatgtttcactgccggtacacagcagcaaattctcacattcataggtttccccaccacattggatggtattcttatctacaattacagcttctcccgttactatatttacctgatgcgcagtcagttttgccttgatacccagtaccagtttacgaaccacttttgatttacgcgccacaatttttcctaaatcaaaagaagcttcaggcacattcacggcatactttgaagcatgttttgcataatcatatactttagccgaataaagcaaggttttggtaggaatacatccctcattcaggcatacaccgcccaaacttcttttttcgaacaatacaacactcagtcctgcctttccggcagcttcggcagcagtataccctgcgggacctccaccgatgattgcaatttgatatttcat

SEQ ID NO: 109 - DNA, 22379 bp, unidentified
  source 1..22379: mol_type = unassigned DNA
atgaatacaaaagatgtgatcctggagctccgcacgaaaaaaggcctgtcgcaggacgagctggcggagaaggtctatgtgacccggcaggccgtctcccgctgggaaaccggcgagacggtcccgaacaccgagacgctgaagctgctctcgcgcttttttgacgtctcgatcaacacgctgctcggtgcgccgcggcagctcatctgccagtgctgcggcatgccgctcgaagacgggaacatgagccgcgaaccggacggctcgttcaacgaggattactgcaagtggtgctatacggacggcgcattcacgtatcagagcatggatgcgctgatcgatttctgcgcggcccacatggcaaacgatgcctttccgcccgtccgggtccgcgcctacctgcaggacctgctgccgaagctcaagcactggcagatcgccgagaacaaataaccacaagatctatcccatctggagtcaacaaacatgatcgataccatgctcgtccggggcgcaaaagtccataatctcaaaaatatcgacgtcgagatcccactgggcaagatcgtcggcatcgccggcgtgtccggctcgggaaaatcctcgctggcgctgggtgtcctgtacgccgagggttcgcgccggtatctcgaggcgctttctacctacacccgccgaagaatgacgcaggcgtcgaaggcctgcgtggacgaggtgctgcatgtccccgccgccctggccctgcaccagcgccccggcgtgccgggcatccgcagcaccttcggcacgggcacggagctgctgagcagtctgcgcctgatgtactcccgccttgccagccaccgctgcccgaacgggcatgaactcgcgccgtcgctgctcgttgcagccggaaaggagctcgtctgcccgacgtgcggcgcgcatttttatgcgccgtcggctgaggagctggcgttcaactcacagggcgcgtgccagacctgcggcggcaccggcgtcgtccgcacggtcgatcttgatacactggtgccggacgactccctgaccatcgacgagggcgcggtcgccccgtggaacagcctgatgtggtccttgatgacggatatctgccgcgcgatgggcgtgcgcaccgacgtgcccttccgcgacctgacggaacaggaaaaggacatcgtctaccacggtccggccgagaagaagcacatcctctaccacgcaaaaaaggccggctccaacgactttgccgagctggatttcacgtattataacgccgtctacaccgtggagaatgccctagcaaaggtcaaggacgagaagggaatgaagcgggtggaaaaattcctgaaggaagatgtctgcccggactgccgcggcacgcgcctgtccgccgccgcccgtgcgccgaaggtgcgcggcatttcgctggacgaagcctgcacgatgacgctcgcgcagctggtcgaatgggtgcagggcgtcccggccagcttaccggaggacatgcgcccgatggccgagagcatctgcgaggcgttccagagtaccgccaaacggctcatggacctgggactcggttacctgacgctcgaccgctcggctgccacgctctccaccggcgagcgccagcggatgcagctggcccgtgccgcgcgcaaccgcacgacgggcgtcctctacgtgctggatgagccgtccatcggtctgcacccgtccaacatcgtcggcctcaccggcgtgatgcacgatctggtggatgacggcaactccgtcattctggtcgaccacgacacgcagatcttaaaggaagccgactggatcgtagagatgggtccggaagcgggcgcgaagggcggacacgtcatcgcgcaggggacgatcccggcgatcgaggaaaaccccgcgtcccagatcggtcccttcctctccggaaaagccgagacggagctgcggccccgggcggcgaaggaagctgtgtttgcagatgggaccatgcatctgtccacgtctcagatccataccgtcaagccgctggaggtcgagatcccgaagggacggctgaccgtcgtcaccggtgtgtccggctccggcaagaccaccatggtgctcgagagcctcattcccgctctggaggcaagcatcagcggcagcgccctgcccgcgcatatccgcgcagtcaaagccgacggtattgcgcatgtcaagctcatcgacgccacgcccatcggcatcaatgtccgctcgacggtcgccacctacgcgggcgtccacgacgagctgcggaagctgtatgcgagatctgccgacgcaaaggaaaggggctatcaggcgagcgacttttcctacaacaccggctccctccgctgccccggctgtgacgggacgggcgaggtgagtctggacgtgcagttcctgccggacgtcaacatcccgtgccccgactgccgcggctcgcgctacgcaagagccgcttatgatgtgaagctcgcaaataagaccggcaaatgcgtgtccctgccggagcttatggacatggatgtagcttccgcgcttgacttctgcagggatatgaagaccgtcagccagaagcttggcattctgaagcggctcggcctcggctatctgacgctcggcgaggaaacgccgagcctctccggcggcgaagcgcagcggctgaagcttgcgagcgagatcggcaaaacgcagaccgattccgtcttcgttttcgacgagccgtccatcggcctgcacccgctggacgtgcgggtgctgctcggcgtctttcaggcgctgctggacagcggcgcgacggtcgtcgtcatcgagcacgatctggacgtcatccgcaatgccgatcacatcatcgacatgggccccggcggcggagacgccggcggccgcatcattgcagccggtacgccggacgagatccggcaggatcccgccagcgtcaccggccggtatctgtaaaaccagaaaaggaggccagcagcatggaattgcctgcctgtccggtagagacgacgctgatgctcatcggcgataagtggaaggtgctgatcctgcgcgatctgatgagcgggacgaagcgcttcggcgagctgaaaaagtccatcggtcacgtcacgcagaaggtcctgaccgcgcagctgcgcgatatggaggccaaaggcctgctcacgcgcaaggtctacgccgaggtaccgccgcgcgtggaatataccctgaccgctaccggctacagcctgcggcccatcctcgactctatggtggcctggggcacggattatcagaagcaaaacggaggcgcaccatgcgatccataagacggcctgcacggccgagatcgccgcaaagatcccctgcacgcaggtccttgggacctataccgtgacctttgaccgctgaaagagaggagacctctatgccatatccctggatcgacgactatctcctgcagaagcccagtgtcacaaaggacctgcagccggactggaactggatccgctatcagatcggcggcaaactgttcgccgccgtctgcctggacgatcaggaccagccgtattacatcaccctgaagctcgaccccgccgagggagacttcctccgcgggcagtatgaagacatcctgcccggctactacatgaacaagacccactggaactccgtccgcgcgcagggctccgtccctgacgatctgctgagaaacctcctcgacgaagcctaccgcctggtcctccgcgccctccccaaaaagaaacaacgggagatcacaggcgaataaagaaaagcatgagctgctgcgaaaaaggcaccggggctatttgccccggtgcttttcctttcgtttctgctgccggcaggtaaagcggcgctgcttttcttcttcccgctgctcgcgcgagcgggtctgcttttcaagcttctgcgcctcgcgctgcagctgcagcgcctgctgtgaccgggtgccgactgtgccggcggcggtctgcttccggatctggcgctgcatccgcttcggatttgccgcgtccggccggatggccgcggcaacagacggactgaaccgcagacggctgtggtttttcagcacgtaggccaggacctcatagtccttcggctccgcgccgaaggtgaccttgcagaccgaaagcgtattgccttcgatccgctcaaagatcccgacccagaacggcgcctcaaacaaaaccgtcagtctggtcaaattgctgtccataacgaaaccctcctgaaaagaaattccgcaggaacggacgacccggaggggagggttacttacctgcgccgcgcgggcgcagacggctgggctacctaccagctctggcggaccaaagactcagcccacgttgcgtttttatcctgcgattatattaggcgcagatctgcgcgtaataccggattcagcggccgaacagagcggcggcctgctccatgcgccgggcgatcggcacgccgaacggacagcgcgcttcgcacgcatggcagccgatgcattcggaggccgtatgccccagcagctcgtagtgcgactggatggtcgccgggacctcgggctgcatggtcgcaagatcgtagaatttgttgatcatcgcgatatccagctccgcggcgcacggcttgcagtgcccgcagtaggtgcactggccgcggtaggagtggaacggcgcgttggcgagcaccgacgcgtagtccttttcctcggccgacgcggtctcgtaggcgacggccgcgtcgacctgctccttcgtgtcgtagccgcacaggatggaacagaccgccgggcgcgtcagcgcgtaatggatgcactgcaccggcgtcagacagacgccgaacggcgagcgtttctcatcgaacagccgcccgcccgcgaagcccttcatgaccgtgatgccgacatcgttctgctcacagacgctgtacagatgtgcgcgcgccgcgtcgatgcctttgagccccgcgtcaaagcgctcggcgaacatcgtgtcgatatcctcgctcgccgggagcatgtcgaaggccgggttgacgctgaacaaaatcatttccacgaagccggactccgccgccttcaccgcgaccttcgggttgtgcgagctgaggccgatgtggcggatgacgccggtctttttgagctccatcacgtaggaaagatagtcggagtgcaggatctgctcccactcctcctcggagtccacgtagtggatcatgccgaggtcgatgtaatcggtctgcaggcgcgtcagcagatcctcgaacgccgggcgcacatagatcagatcgcgcgtgcggtaatactgcccgttcttccacgtcgagccgagatggccctgaatgtaccagtgggcgcggtcgtcccggatgcccagaccgatgatgtcccgggacttcgggtccggcatccaacagtcaagaatgttgatgccggcgtcggcggcgtaatggatcagctccacaccttcttcctccggatggcgctcgagccattccgcgccgaagccgatctcactgacctgcagccctgttttccccagtcttcgcgtttgcatctgtgttcctcctgattataagttatgttaactgataaaggaagcctgtgtttctgtttccactatagcagaagccatcggaaaaatccaccatccgacgcgaaagcatcctgctgcaggtacgaaaaattcgaaaaaaatttttttcgccgaaaatcgcatgattctttatctatgcaaagcttaaaatcgctaaagtgattctttctggaacatttcacaccgaaacgctcggcaatgccgcatttcgggcacttgacaagcggaatgcccgcgcggtattttatgggatattaaaaaaagaaggcgaaaaacatgacccattacaatctcctgaagctgaagcccggcgcggatgccggtgccatctttgcgcagtgcgaagcggtctacgccgcgctggaagcggagctgccgtttttgcacgacgccaaagtcatccgctgctgcactgtgcgcgattccaacgcggatatcctgatgatcatgcagatcgaccggccggagcagctcggcacgtatctgcagcacccgaagcatgtcgctctggcgcaggggatgaaggacagcatcgctgccagaatgtcgtttgacgcggaataacttccacgaatccgaaaaagagagaagagaaacgttatgcagaagaaaaaaacagcagttcccacctatctgggcgtggccgcagtctggatcggcagccacttcggccccggctttgccaccggcgcgttcagcgtccgctggtacgtcaaatacggctgggtcggccttgtgacgcccctgctcgccatgctgatcaccggcggcgtcatgtatttcatgctggaatacgcccgcgagcacggcacgccgaactatcgtcccttcgcccggtcctgctacggcgagaagctgggcggcgtggtcgccgtcttatacgatatctgctttctgatgaccatgatgtgcgccggcggtcttgccttctccggtgagggcaagctcctgcagggcttcctcggcgtcaattattgggcgacggccatcgtcacgatcctcatttccgccgccctctgcctctatggctccaagctgctggcaaagtcctcgggctatatgatgtacgccatcgtcggcgtcgtcctgctgatcacggtgctggccctgacctgcggcgacagcgacgtgcccggggccttcgccaactccgcggccaacgccaaggaccccagcctcctggacgcgatcctcagcgccatgcagtacggctgcttccagtccaccatcgtcttcaacgtcatgtccgtctcggacgtggtgaaggacaaaaaggaggcgcgcaaggccatcggcgcgggctatctgatcacgatcctgctgatggtctgcctgatcttcacgctgttcagctatacgaatgtctttgacgtctgcgccgagacgctgccggtcatgtccgtcctgaaccgcctgggcatgaaatggctgcagtggctgtacgtgattttgatgacgctcgccgtgctcacgagcgcggccggactcgcgcatgccggcaatgtccggtttgacggcctgttccggtttatcaaaaacgcgcagctgcgccgctttgtcatcacggccatcctgcttggcatcgccgctgtcggcgcggccctgggcttccaggccatgctgcagcagggcacctccatcgtcggctgggctgccatccccattgtcgtcatccccgccttcaccatcgtcgcctccaaggtgcgaaaagccaaatgacccatccaacccgcccggccccgccgggcgggttttgtatcgccgcctatctaatgccttccccctatgaggggaaggtggcacggcgaagccgtgacggatgaggtggaagcacttgcgttaacgagacggtgtccacctcatcagtcagcctgacggctgacagcttcccctcataggggaagccattggagtgcgttccccaaggcctcccctcccaggggaggtggctcggcgcagccgagacggagaggtcgccgcaaatttgcagcaacctctcagtcaccttcggtgacagctcccctggaaggggagcctttccccgcaagaaggtaacattcatctggatttccaaagcaccttctattgatggcagatattctacggaaactagctgcaaatttggaacccccgtatcaggcggcgcgtaccaaaacgcccgtaaggtgaccaccgagtggaacgccagaccgaaacattagggcttacctgaaatcagatgcagaaagcacccaacgcatccaagcgccccttttctcccctatcttttccggcaagacggaaaagatagggccgccggaggcgcgtcagaaacgaccacgacggaacgaagccttgcatgcaaggcttcttatcctctgtgctcgttttttcctttccaaaccgcaagcgaaacttgcggtttgggtttttctatgcaaaccagccgacaacctctcggtcagccttcggctgacagctcccctgaaaggggagccttttggggtgcttgacagccttgctatactgaaatcaggaaccaaccacaggaggtatgttttatgagcaaaaaacttgtcgcctatttttccgcttccggcgtgacgaagaagcttgccgaaaagctggctgccgccgtggatgcggacctgtttgagatccggccgaagatcccctataccaaagccgacctcaactggatggacaagcagtcccgcagcaccatcgagatgcagaatccgtcctcccggccagagatcgccgagggcggcccggacctttccggctacgacacgatcttcgtcggcttccccatctggtggtatatcgcgccgacgatcgtcaataccttcctcgagagctgcgacctgaccggcaagaccgtcgtccccttcgccacctccggcggcagcggcatgggcagcaccaacaaggccctcgcgcccagttgcaagggcgcaaagctgctcgaaggcaaggtcttcaagctcagcgccagcgccgacgcgctccgcacctgggcggagagctgcaaataaaaacagcagaaaacgcgcagtccgcatccgcgggctgcgcgttttgcctgtgcggcgcaatcgcgcgttgcaatttcaccggatccatgatatagtaaaaccaattatcagaaagtgcagggaaaccgccatgcgaatgagaagaagaaacaacctcgcgccccggatggaggcctgcgagtccgtctggatccacgagccggaggcgctgcgcggcagctggcgcagcctcatgcccggctgccgtgagctgcgcgtcgaggtcggctgcggcaagggcaagttcaccgttgagaccgcggaggccgaacccgatgtcctgctcatcgccatcgagcgtgtgcaggacgcgctggtgctcgcgatggaggccgcgatccgcaagggcctcaaaaacgtcttcttcgtctcgctcgacgcggcgaacatcgaccagtttttcgccgacgatgagatcgacctgctctacatcaatttctgcgacccctggccgcgcaagaagaacgccaagcgccgcctgacctaccacaccttcctggaaaaatacaagaaggtcctgaagctcggcggccagatccatttcaagaccgacaacgccaatctctttgcctggagcctgccggagatggagagctgcttcctcgagctgcgcaatgtcaccgacgatctgcacgcgaacggcccggtcggcatcatgaccggctatgaggaaaaattctacgccctcggcacgcccatccaccgggtcgaggccgtcgtcgtgaccaagcagccgcgcccggccgacgcaaaggagcccgaagaggccgaagcaggggaggacgcataagatgctgccctccatcggcatcatcggcggcgcggacggcccgaccgccgtgttcgtatccggcggcctgtcctggggctggctcgccgcagcggcgctggcgctcctcgccctcgtcgtctggctctccaaccgccatagatcataaaaaaccacgctgcccggctcccaggcagcgtggtttttattatgatgcttattcgtagatcgggtgctttttgacgagcgctgccacggcggcgagcacggcttcgcggtttgcgtcgtagtcggtcgcgatcttgtcgatgcagtcggcgacgacgggcatgtcttcctcggtaaagccgcgcgtggtgcaggccggagtgccgatgcgcacgccgctggtgacgccgggcttctgcgggtcgttcggaatggcgttcttgttgacggtgatgtggacctcgtcgagcttgatctgcaggtccttgccggtgatgtttttcttgcgaagatccgccagcatcaggtggttgtccgtgccgccggtgacaaggtcaaacccgcgctcgagcagcgccgcagccagcgccttcgcgtttttgacgacgttttcggcgtagaccttgaacgccggctgtgccgcctcgcgcaggcagacggccttgcctgcgatcacgtgcatcagcggcccgccctgcgtgccggggaagacggcgctgttgagcttctttgcaaactgctcgtcgcgagagaggatcatgccgccgcgcgggccgcgcagcgtcttatgcgtggtggtggtgacaacatcggcgtaggggacggggttcatatgctggccgcccgcaaccagacccgcgatgtgtgccatgtcgaccatcagcagcgcgccgctgcggtgcgcgatgtcggcgaagatcttaaaatcgatcgcccggggataggccgacgcgcctgccacaaggagcttcggatggtagcggcgcacgagatcctcgacctgatcgtagtcgatgcggccggtctgcgggtcgacgccgtagctgatgctgttgtagtatttgccggagaggttcacgcgcgcgccgtgggtcaggtggccgccgctggccagatccatgcccatgagcgtgtcgccgggctgcagcagggcggcgtagacctccagattcgcctgcgcgccggaatgcggctgcacgttggcgtaggcagcgccgaagagcgctttagcgcgctccatcgcaatgttctccagcacgtcgacatagtcgcagccgccgtaataccgcttgccgggataaccctcggcgtatttgttcgtcaggacggaacccatggcggcgatgacggccggggaggcgatgttctccgaggcgatcagctcgatgttctgcttctgacggtgaaattcgttttcgatgcaggcggcgatctccgggtcctgcgtctgcaggaagttcatgctggtttcgagtacgttagccattgcgatgtgtctccttacttgatatacgatagaaatgaaaaaatgagcaggccgtctccggtctgctcattgaaatgccgtattacaattgctgtagctgcggctctgtccttttgcctgagagattcggctcacgccttgcaccttcggcactcaactcaatgagttctccagagattccttctgtctccagtccgcgcgggcgttctgaagacgatcaacgggattcctgtattcaattgacggcgttattatacacacctgacggacaaatgtcaacaggctgtatgcggaaattttcagccttccaccttcggcagctgcgcaatgcttgcggccagctgttcgtcggtcgggatggtatcggtcatctcgtggtcgttgaacttctggtaggcgacgagatcgaaatagccggtgccggtgaggccgaagacgatggtcttttcctcgcccgtttccttgcacttgagcgcctcgtcgatggcggcgcggatggcgtggctggactcgggggcggggaggatgccctcggtgcgggcgaaatactccgcggcctcaaagacgctcgtctgctcgacgctgcgggcctccatcagcccgtcgtggtacagctgcgagaggatggggctcatgccgtggtagcgcaggccgcccgcgtggttggccgaggggatgaagccgctgccgagcgtgtacatcttcgccagcgggcagaccatgccggtgtcgcagaagtcatacgcgaacacgccgcgcgtcaagctggggcaggaggcgggctcgacggcgatgaagcggtagtccttttcgccgcgcagcttttcgcccatgaacggggagatcaggccgccgaggttcgagccgccgccggcgcagccgatgatgatgtcgggcgtgatgccgtatttgtcgagggcgatcttcgtctcaaggccgatgacgctctggtgcagcagcacctgattgaggacgctgccgagcacgtagcggtagccgggcgtcgtcgtggcgacctccacggcctcactgatggcgcagccgagggagccggtggtatccgggtccttggccagaatggcgcggccgatgttcgtggtgttcgacgggctgggggtgacgctcgcgccgtaagtgcgcatgacctcgcggcggaacggcttctgctcatacgagcacttgaccatgaacaccttcaggtcgaggcccagatacgcgcaggccatagaaagcgcggtgccccactggccggcgcccgtctccgtcgtgacgcccttgagaccctgcttcttcgcgtagtaggcctgggcgatggcggagttcagcttgtggctaccggaggtattgttgccttcaaacttgtaatagatcttcgccggcgtgccgagcttttcctccaggcagtaggcccggaccagcggcgacggacggtacatcttgtagaaatcgcggatctcctgcgggatggggatatagggcgtgtcgttgtccagctcctgctcgatgagctcgtcgcagaagacgggacgcagatcgtcgaagcccatgggcttgccggtgccggggttgaccagcggcgcgggcttgttcttcatgtccgcgcggacattgtaccaattctggggcatctcagattcagacagatagatcttgtaaggaatgttttcggttttcatggttgcttctcctttcgcatgttggtctctccgggagaagggcaacaaaaaagaccttcatccacagagaaaaccggtttcggtttgatctcttgggacaaaagtctgaaaacttctgcggtgccacccaaattgacaattgcttgtccgctcatgatacgctgacacgtatcttcccctgtaacggtgggaactccgtcaggacctacttgcttgcgcgttcaacctgccctccgcagtccattcggcaaacgtctttctgctgcactcgcaccatccggcagctctctgggagaaatcctgcttgcttactcgtctgcatcaacggtttcatcttggctcggattatacagcggccaaaccggtttgtcaagtgtttttttcaataaaccgacaaaattcctcggctatccagatgcttgcaaatggcgcgcccatatgctataaaaagcggagatattgcttattcgggggcctcgccatgaaaaactcctgccagaggacgatctatgcctgctacgccggttatgtcgtgcaggcggtcgtcaataattttgttccgctgctgttcgttatgttcgagcggagctaccagatcccgctgtccaggatcacgctgctcatcaccgtgaatttctgcatccagctgggcgtcgatctgctgtcgacctggtttcttgaccgcatcggctaccgcgcggcgatcctgttctcgcacgcgttctccgcggcggggctcgtgctgctgacgatcctgccggatgtgtttccggatcccgcggccgggctgacggccgccgtggccgtctacgcgctgggcggcgggctcctcgaggtgctgatcagcccgatcatggagtcctgtccgacggacaacaaggagcgctacatgagcctcctgcactcgttctactgctggggccatatggccgtcgtgctgctttccacggcgtttttcgccgttttcggcatcgaaaagtggaagatcatggcccttctgtgggcgcttgtcccgctggccaacggtattttcttcgccgtctcgccgctctatcccatccagagcggcgagaccggggccctgccgctgcgcgagctgtgccggaagaagctgttctgggtcttcatgctcatgatgctctgcgccggtgcggcggagcaggcggtgagccagtggtcctccgcctttgccgagcagggcctcggcgtgtcgaagacggtgggggacctggcaggcccgatggccttcgccgcggccatgggcatttcccgggcactgttcggcaggtacggcgggaagctcgacctggggcggtatatgcaggccagcgcccttttgtgcatcgcggcctacggctgcatcgtcttcgtgccctcgccggtcctgagtctgatcggctgcgcggtcacgggcttctcggtcggcattttctggccggggacgttcagccgtgcggcggcctcgatccgggacgggggaacggccatgttcgccctgctggcgctggccggggaccttggctgcgcgggtgggccgacgctggcgggcctcgtctcgagcgcctgcggcggcagtctgcgcgcgggcatcctcgccgcgctgatcttcccggctctgatgcttgtctgtctgctcggcatgcggaaaacacagtgacaaacgcgcaggagcgcctcagcggccctcctgcgcgttcatgtctgtcagggagtattttttgtgcggccgctttttggccgcgttcatgtcctgcagcgacgcgggcgcgtccggctgcccccggcggcagttcatgtcgcttagcgcgcagctgcgcgtatcgtcgtgtgagatgccgttcatgtttttcaggctgaacggctcttttcctttcggcatatcaagcgcctcctttttgctggttttcccggcacagaagcgaaatatgcagccccgcccgaaaaacaggcggggccaaggctcagtcgcggcggcagttcatgttcgtgaggctgcaggtcctgtccggctgcgcgttcgcggcgttcatatcctgcagggaaggggactgctccggctgccccttgcggcagttcatatcgcctagcgcgcagctgcggccgctgtcatccgagatcccgttcatgttggtaagaccgaaagatgtgttcttctgattcatgttgtattcctccattacaataaaaataattattactaatattattatacagatagcaacagaaaagtcaacccccaaataaaaaaagtgctcagatggatgcacataccatatttttgtgctatcctgtgtacagggcggggggcgaatgaaagtaaaacagatgaaagaataggagttcatgatgagaatcgaatttgaaaacatcgtccttcgggatatgatagagtccgacattgaagactatgtgcgctggttcaccgtggagcgtgaatgggaaaactgggatgctccctgggagaaagaggacacaaatgcggaagctgagcggaaaagctggacggaacgctatgaatacaggaaaaatcttctagatgatgtccgccgttacaggcttgagatcgaatggaacggcaggcatatcggctcggtaaacgcctatcacattgatgaaaactacgaatggatcggagcagccgagagtgggcagatggtccatctggctgtcggcgttggtatttgcgaacatgatttatggggcaatgggatcggcacaaacgctttgcgtgcctttataaattaccagttaaaaatcggcgcggacgaaatttacacgcagacctggtcaggcaatgttcgtatgatccgctgcgccgaaaagctcggctttgttgaatgcaatcgcaacataggcacacgagaggtcgacgggcaatgttatgatggactgacctttcggttggaggaataaaaattacatatcgaatatgactctgtgagccacattcccgtggatgtaccgccaaaaaagaaacaggcatgaccgaagcggtcatgcctgttttttataatcagccgttttttgtgcgatcccctgcacccctcacgcttcccaggaaagccggatcgactggggcaggacgagctggtcgtaggtgacatcgttgcttacgtagttcacgccctccagactgctgcagtacccgccgtagtaggcgaggcccgacgcgtcgaacacggcgacggtgaacccgcagttgtcgacgtatgtgccgtcctccgtgatgagcccggcggtgctcccggcgagataacgcttggtggacgccgcaccgttgaccagcaccgtcttgtcgttgcgcacgagggccagccgctcaccgtcaaacgccatctcgctgatgctggagtagccgacggcaaacggcagctccgaatcaaaatcggacgtcagcgcgacctggaattgcccgtctgcctcctgcgtcagcacgcagatgcgccgctccgacacgcggatgcaggtaaaatcgtccgtctcggtgatatttgtgtaatcctcgtccgtgaagtcgtccatcacggccagcttctgcaggacggcggcggtcttgacgtcgattaaggttacataatatatattattttcaaccgtatgcagcaccagtgccgacccgtccggcgtcagcccgaggtgccggatctcgaccgccgggtccagcgggaagaagcaggcgagctggtcggcgcacagataggtgtccgggaagctgtccgcctccgactggacatagggcaggatatagatcccatagccgcccggaatgcggctcatgtcgacgagcttgccgttttccgtccggttgctgagccggaagaagcacgcgtcatccgtcacgacgctctctgagcttggccagtaccggtcgccctgctgcacgcttgaggcgccatagctggagctgctgccgtccatattcttgtcgatctgcagctccacgtactcgtccggaagcaccgggatgcggaaaaagtcccgcagggcatgtatggcgtcccgttctgcatcggtggcgtatgcgtcgtgatcgtcccagctgtcaagcgtggtgataaacaggtgcggcagatcgacggagaaccagagcggatactcgtcgtagtagtccgcgacgcggatgaccttcgtgccggtctgcccgggctcgagcgtgtcgaggatctcctgataggcctttctgtagccgaaggggtttgtgtcactgtcggtccagacgttgacgcgcgtgtcgacctccacgccggaatactgccgcggctgttcccgcgaaacagcgacaggggagaagcggaacgcggtatctgcggtatagtcccggccggagaagcgcaccgtgctgtcccagaacagattctgccgcagcgcggcctgcagctgtacctgcagccctgcggcggccgccgggtccccggcgaagacatgctcgtcgaacgtcacgtcctcgcgcggcgcggccaccgcgtgcgtgcagaccgccgcgccgcacgcgcataccagcgccagcgcgagaaatacgatcagagtcttacgcatcgtcgtcctccctgccggtcagctcggcaagcgcctttgagacgcggtcagactgatagctgaacgtctgcttcacgtattccatcagcgtcagcccctgctcgtcgagcgccgcggtctgcgcgtcgccgacgatcttcccctcgtggagcagtacggctcgcccgatgaaccccgtcacctcctcgatgaggtgcgtggacaaaatcaccgtctcgtgcggctcaagaatgccgagcaggaccttgtagaaatcctcgcggttaaagacgtcgttccccgcgaacggctcgtccatcaggatatagtccgccccctgcgacagggccatgatgacctcaaactggtttttctgccccgtcgagaagctgcggatgggcttgtccatcggcagaccgaaaaactccatcagcccctcaaagcggcgggagaggaacgtctcaaaatgctcctcataaaattcccggtgcgcctgggccgaaagggcggggaagaagctgtgctcgcaggtggcgaaggagaaccggccgatattcgcgcgcgtgatggccgcgccgtccagcgtgaccgagccgctgtcatagcggatgagcgacaggatgcacttcatgagcgtcgtcttgcccgcgccgttctcgccgaacaggccgacgatctcgccgggcccgaccgtcaggctcacgtgatcgagcgcctgcttgtccgcatagcgcttgcagagatccttgatttccagcatcagaaatacgcctcccagatctgtaaagtttccgccggcggcatgcagcgcgccgggacgccgtggtgatagaccgtcgcgaagatcgcgagcagtatgagacttacaagaaaaccgactgcgcaggcgaccgccgggatcgtcaggcagcgcacgtgcagctcctttgcgctcggcagccgcttcatgacgtaaatgctctttgtctgccgggaaaatgacgcgtagttcgccgcggcgttgaacccgcagacgagcagatacacccagaaccccgagagccggtgccggatgaggctgttgaggctcgccatgaccgcgccattgcgcaagaccagcgccccgtagcggaactcatacagttcgcgcagcgcctgccggtagccgctgaagaatcccagcccccagaacacgacaaacaccagcagcgccagcacgtaggcgatgaacgccgtccgcagatcgtcgcccggcggggcgaagcgggcgagcttcttagtccagttcatcctcgggcccctcctttccgttgtgcgcctgcaggaatccaagatatccgcatatgcccgcggcgaacagcgccgccacgctttgcaggatccccgcggtccggccggagccgaacccgaccggcagcaccagcagcatcagtccggtcagcacgaccagcgccagccgccgcccgccgttcttccgccgcagccccagctgcatgtatgcggtcaataccccgagcgccaacacgaacaccacgttccgcacccacagatacccgtccgccagcggcagcagcccgtgcaggaattcgctgcggtaaaaatccacaaagatgccctgcgcgccctccgcataccgcgcgtccgccgcgtgcagcgccgccgtgccgaccgaagccatcagctgcacgccccacacgcacgcaaagcagagcgcattgcacacgccgctccagagcagcacccgcgtctccgggatctgcagccgccgcagcgtgtagccgtaccggctgcccgcgccgaagcagctggcgagcagcagctggcaggcgaccagccccagcgaaaagatcacccgcagcgccgtgaccagctcgctgcccgtgagtgaagcccggaacccacgcaggccgaacaggacgtaggccgccgcgtccagcgccagcattcccagcagcaccaatgccagccgcccgatcgcggcccgcgcgtgcagcgcaaataccgaaagctgctttttcatgtctcttcctcctcccacgcctgcgcgagcaggcgcagcgcgtcttccttcgtgatgcccatctgccgcagcgtccgcgccgcgttgcgcagctcctcggacaaaagctcctgccgcagcgccgcgagcgttttttccggcagcgtcatgcagcttttcgcgcccgtgcgcgattcgatcagctgttcttcctccagcagatggaaggccttctgtaccgtattcgggttgatccccagcagcgccgagagcacgcgccgcgacggcagctcatcgccgtcccggatcgtcccggcgaccgcgccgcgcttgatataccggatgatctgcagatacaccggcgtcccatccacggcccggaacgcgtcaaatgaaaccatatcctcaccaccgtattacttgactcatacacttgataactgtattatacagataacacacttctctgtcaaccccgcccttgacatttcccccgaaaccggatactctgaaaaagaaaaggctcccctttcaggggagctggcagccgcagactgactgagaggtcgtctcctgcctctgaatttaagcaagcgccaatgtttcaggcgtcgttccacacgatagtcaccttacgggcgtcatactacgcgccgcctgatatgtaggaagcaaatttgcaactgattgcctttgaatgtctgccgtcaatagaaggtgcagaagaaatccggatagcctgttcctttatgcgggcgtccctcaacgatcatcccacccacaggaggtccccatgtctgaactcaccaagcgcgctttggagcagtcgctcaagaatctgctgctgcagaagccgctcaacaagatcaccatcagcgacatcgccgacgactgcggcatcaaccgcatgacgttctactaccacttcaaggacatctatgaccttgtcgagtggtcctgccaggaggacgcggccaaggccctggccgggaagaagacctacgagacctggcagcagggctttgagcagatctttgaggccgtgctggccaacaagcccttcatcatgaacgtctaccactccgtcagccgcgagcaggtggaaaattacctctaccagctcacctatgacctgctcgagggcgtggtggaggagcaggcggccggcatgtccgtccgcccggaggacaaggcgttcatcgccaacgtctataaatacgccttcgtcggcctcatgctcgactggatcaagcacgacatgaagggcgagccgaagcagatcatcgaccggctcgaccgcgtcatccacggcagcgttaccgccgcgctggagcgcttccgcctcgacgccccatcagatccacccgtttgataaaaaactatacaatttcccgcccggtgataagaactttatcaccgggcattttctgcttatggcgctttttctggacctgtagtatgctcataccatcgaaagggaaacataaaacatcgtttccagactttttatggaggtattgatcatgtattattcgagcggcaactatgaagcatttgcaagacccaaaaagcccgagggcgtggacaacaaatcggcctatatcgtcggcagcggcctggccgcgctgaccgcagcctgctatctcgtccgcgacggccagatgaagggcgaacgggtgcacatccttgagaaggactccatccccggcggcgcctgtgacggctacaagttcgaaaacgtcggctacgtcatgcgcggcggccgcgagatggacaaccatttcgaggtcatgtgggacctgttccactccatcccctccatcgagaccgagggcgtgagcgtcctcgacgagtactactggctcaacaaggaggacccgaactactccctctgccgcgccaccgaaaaccgcggccaggacgcccacaccgacggcaagttcgacatctccgacaagggcgcgatggagatcatgaagctcttcttcaccccgaacgaggacctgcaggacaagcgcatcaccgacttcttcgacgatgaagtcttcaactccaacttctggctctactggcgcacgatgttcgcctttgaaaactggcacagcgcgctcgagatgaagctctatatccagcgctatatccaccacatcggcggtctgcccgacttcaaggcgctgcgcttcacgaagtacaaccagtatgagtccatgatcctcccgatgatcaagtatctcgagagcttcggtgtccagttccactacggcgtgcaggtcgtgaacgtggagtttgactgctccgacccggcccacaagctcgccaagcgcatcgacatcctccgcgacggcaaggaagacgccatcgacctcactgagaacgacctcgtcttcatcaccaacggcggctgcgtcgaaaattcctcccgcggcagccagaacgagcccgccccctacaacaccgagatcaaacccggcggcggctgggacatgtggcgcaagatcgccgcgcaggatccgtccttcggccatcccgacaagttctgctatgaccccgagcagaccaactggatgagcgccaccgtcgagaccctcgaccagaagatcatcccctatatcaagaacatctgcaagcgcgatccgttcaccggccatgtcgtcaccggcggcatcgtcaccgtcaaggattcgagctggctcatgagctggaccatcaaccgtcagccgcagttccgcgcgcagcccaaggaccactgcctcgtctgggtctactcgctctttaccgacaagcccggcgattatatcaagaagcccatgcgcgaatgcaccggcaaggagatctgcatggagtggctctaccacatcggcgtgcccgaggaccagatcgaggaactggcgacgaacagcgccaataccgtcccggtcatgatgccgtatatcgacgcgttcttcatgccgcgcgcctacggcgaccgcccgaaggtcgtgcccgacggctccgtgaacttcgccttcctcggccagttcgccgagaccccgcgcgacaccatcttcaccaccgagtattccatgcgcaccggcatggaggctgtctataccctcctgaacgtcgaccgcggcgtgccggaggtctggggcagcgtctatgacgtccgcgacctgctcgacgccactgtcaagctccgcgacggcaaaaagcctaccgacatgaagctctccctcgtccagaaggtcgccctcgataaggccctcagcaagatcaagggcaccgacatcgaaaagctcctgaaggagtacaacatcatctga

SEQ ID NO: 110 - DNA, 9605 bp, unidentified
  source 1..9605: mol_type = unassigned DNA
ttaagttctttccgccatttcccgataccgctgataccgtctgccggcatcttcctctgcctttgcaaacagtgccttcgcttccttaggatactgcgcttcaagcaccgcataccgtaactggcttcttaaaaattccgtaaaggaagcctttggcggtctggaatccagtgcaaacggattttttccttcctttataagctgcggattataccggtacagatgccagtatccggcatctaccgcctgtttcatgcttgccatgctctttcccatgccttccttaataccgtgactgatacaaggtgcataagcaattaacagggaaggaccatcataccgctcggcttccagaatcgcttttatcgtctggtttttatccgcgcccatagcaatctgcgccacatagacatttccgtaggtcatcgccattgcgccgatatctttttttgccgtccttttaccgtcggcggcaaattttgccacggctgctgccggtgtggactttgatgcctgcccgccggtattggagtaaatctccgtatcaaagacaaggacattcacatctgcaccgctggcaaggacatggtctaatccgccgtatccgatatcatatgcccagccatccccgccaacaatccactgtgagcgtttcaccagaaaatccacccgcttctgaatttccgacagtctttgaatctgccgtgacgtccgttctgcctgttccgataccgccaccggtacatctgaccgcgttaccgcctctttcaacccctgcgccagcttctcacgcacctcttctgccgccgcagtgcaggctgtcggattatcacgcactgcaagccagtgttccagcgcttctgatatcccgcttccgctgtctgcaatgccgtcattttccacgccgctttcacactccctgacaaattcttctgccagccgtatcagcgtttcccgctgtttttttgcaccgagcagcataccgtagccgtattccgcattgtcctcaaacagggaatttgcccacgcaggaccttttccgttggcattgcacgtatatgccatggatggtgcggaagcactccagattgaggaacagcctgtcgcattggcaatcaccatgcgttccccgaaaagctgtgtcacaagcttcatatacggggtttcaccacacccgccgcacgcaccggaaaattccatgagcggccgtgcaaactgactgcctttgaccgtttctttggtcatcagctccggtttatccgccaccgcactgacagcaaacgcccagttgtctgcctgttcttttatctgctttgcggcaggctgcatgacaagcgccttttcctttgccgggcagatgtccgcacagttgccgcagcctgtacagtcgagcggactaacctgtatcctgaacgtatgccctgcaagctcttttcctgccgccgccttgctttcaaaattctttggtgcaagcgcctgttccttttcatttaacagaaacggacggatacacgcatgcgggcagatatacgaacactggttgcactggatacagttcttttcaatccattcgggaataaatgccgcaataccgcgtttttcatatgcggttgtaccggcaggaaatgtgccgtccgccagcggataaaaagtgctgacgggaagactgtccccctttgccttttccataggtcttaaaatgttttcaataaattcgggttcctgcacattttcccgttcttctcttgtggactggagcaattcaacaggcacaagctttgtttcccgaaaaccgtattccgccgcctttatatttttttctacaatgtctgcacctttttttccgtatgccgcctgtatggaatttttcagacaggcaagtgctttttcctgcggcagaatcccggtcagatgaaaaaatgcgccctgcataatcatattaatgcggtttcccagtcccagactgtgtgccagctttcccgcatcaatcagatagagccgtgcatttttttcaatcagcgcatgaaccatttctttgggcagttttccgccaatctgctctgcgccatactgcgtattcaatacaaatatgccgttttctttcaagccttctgtcaggtcatatccgctgtttaaaaaggattcattgtggcaggcgatataatccgcttcctgtatcaaatattccgagcggattggtgtatcgccaaaacgtaggtgggaaaccgtaagtccgcccgactttttagaatcatacgaaaaatatccctgcacatagggctttgcatattctccgatgattttaaccgcctgcttgtttgcacccaccgtaccgtccgagcccagcccccagaatttgcactgcataagccctgccggtgtctgtatcggaaaatccggatgaacggcaagcgaatgatgtgtcacatcatcttcaattccgattgtaaaatgatttttcggctgtacgtccgtcaggttgtcaaaggccgcggcaatctgcgcgggtgtcgtatcctttgagccaagtccataccgcccgccgataaccagcggtgcatttttctttccgtaaagcgcgccgcagatatccagatacagcggttctccaagtgcgcccggttcttttgtccggtctaacacggcaatccgctccacgctctccggcagctcctttaaaaagtcgtctgcactgaacgggcggaacagatgcacctgaatcatgccgtatacaccactgttgtcctgcatgatgtcgtcctgcataccggaactgccggtatcacaatccgtatctgcacagttcatctgcggcaggatttcccgtatggtttcacacaccgaacccatggcaatcactacgtactttggatttttagcgccgtaatactggaaaaagcggtatgttctgccggttcttttctcaatctgtgccatatattcttttataattcccggaattttttcataaaaaagattcgcagcttctcttgtctggaaatagatgtccggattctgcgccgttccacgcataaccgggtgatttggtgacagcgcgcgttccctgaacgcctgcaccgcttctttgtcaagcatttcttcataatcttcataggacaatgcttctatccgctggatttcgtgggacgtgcggaagccgtcaaaaaaatggataaagggcagtcttcctttgactgccgataaatgtgctacggcggcaaggtcgcagacttcctgcaccgatgacgatgcgagcatgacacagcctgtctggcgtactgcacagacatcctggtggtcaccaaaaatgctgagtgcctgtgccgccagcgcacgtgcgctcacatgcagtacccccggcagaagttctcccgccattttgtaaagagtcggctgcattaacagcagtccctgtgatgccgtaaatgtagaagcgagtgttcccgactgtaaaatgccatgcattgcgcctgccgctccggcttcggactgcatttccaccacatctgccgtttcatcaaaaatattttttctgccctgtgctgcccagttatccaccgtttctgccatcgccgatgacggtgtaatcggataaatcgccgcagtctgtgtaaatgcgtaggcggtataagcggcggcagtatttccgtctactgtcataattacttttcccataacatcctccatttataaccggctgccgttatccacccattctttggcatggagggcagcattttcatcaatcaccggaacttccgccgccgtatctgtttgttttatatcgttttgggctgtatttttttcacccgctctttcctgtgtactgtgtaaccgtgcattttttctgccgtcaagtgcctgctgaatgtcttctttcatcgcattgcttcctttcgatgtttttatgacattcagtattgcctgtgtgccgccgattattcaccatttacggcttattttctccgtatcctgtggaactgcggctttactgtgatttccgtcactaccagcccctctctttgtgccagtgcaaatgccgccgcttccgccacttcttcgggcagcaggtatgatgcttcttcttctccttcacaaaagtctgcattgcggtacaaatcggtctttgccatatccggctgtatcgtaatcacccgcacaccgtatttgcgcacctcgtcaaacaggctctttgcaaagccggacagccctgcctttgtcgcaccgtatgcacagccgtgcggattggactgcgctgccgtaacagaggatatatttaagactgtccccctgttcttttttaatgttcgcaaaagctgctgtgtcagaatcatcggtgcttccagattcgtgcgcaccattttctgaatctttttcggatttaattcttcatgcagaccgtaataaccgacccccgcattattgaccaacaccgtgacacggtaattcttatcaatctctttaatatgcgcacacaatgcctgcgtgtccgtaatgtcacagaccaccgcatgaaatttttccggctgttctttgcaaaactcctgtgcttctgctctttcaaaatttcttccaaaaccaaaaacttcatacccatttttgacaagcatacggctgagtgccagtccgattccggaagacgatcccgttacaaccgccgtatctgccacatttgccatatccgtgttctgctctattcttcccataaaaatatcctttcttttggcagtcttttttcaagctgtccggtcagaaatccctccatgcgcgtcagcagttccggcggatactgatacacaccgcccacattggtatacggaaactgcaccactgccgcatgcggctctttcttccgcatattttttaaatattcctttgaaatgcggaaacttccgacacttacatccaccagccgtttccagtcaatctgttcgtcaacgcattgaagcatttctgcataaacattttcccagtccttacagtaaatcatcgggtcaaatgccagacgcacggaaaatccccactgtactgcttctgccgcacacgcaatccgcgcctgcatatccggcgtaaaatgttcatatgccgcaatgaccggctgaggcgacatggtaaatgcaaatattacccgctctgtgactgcctgctgtttaaaataatgcacattggcgctttttgtccgcacttcaattgtaagattttcatgttccgtcgtaaaccgcatccactctgccgtataaccgatgaccggttcgaccgcaagcaaatccgtatcatacgacacacacaggtaaacgctgtgctgttctaacaaacgctccacttctgcaaaaatgtcttctaaatttacaaatagcactacatttgcagaaggatacatgcctttcagatagcagtattcgcaatcgtaaatgcagttcatcatgcaggacgtataataaaaccagtgattaccaaagctttggcagaccggcgcgccctgataaatgagattgtttttcttttctgccagaatgagattctgcgttttatgctgtctgaccacgctctgtcccctgcggcagaagacatctttataatgatgtaccggtatcacctgtgcctgcggaaagcgggacagaattttttgtgttctcggatgattccaaaccgcttcttccacataaatatgcgaaaaccgtctgttataacaattcttttctaagctgttcaagacaccgcttcccttcttttttatccttgcacggcagacttcctgccgcataaccgtcccggattatgtcttcataatctatacccgataaccggcagtactttaacagctggaacagttctgcttccatgacggcggaacagtgcatatcatgactaagacgttctgcctgccgctgttcctcttgtgataacacctgctgttcccgcgcataatctctttctgccgctgcaaaccgttccacggcttgcgcaatctgtccaatctgtgcctgcaccagttcacgcacggtatctgcggacattttttcctgtacaccgttatcggatatgatttttataaaaaacatctgatgcggaccgaaaaaatgatgtgccgcctgataccccgccgccgcttccatgtcatataattctatattatataattccgtgtcacataatttcaccggatttgccgtatccgtattttgcggcatatccgctttctgacatacatgttcctctgacacacttgctttccgccgcacgttcattcctgttacaaccgcagcttcgggaaacggatgcctgtataaaatatccgggtaaaatgtcttttgtgtcgcttcttccgtaattttgctgcacagataagccacaccttttttctgttctgcgcctgcgcatatgccgcactgcacaaagatatctcccgctttcacatgtcccattgcacagacagccgcgacaactgtcgcggctgtaatttctcccgttcccgtaattgtaaggcatatctgctgttcctcacagcgatacatttcaaacggaagggaatttatttcttttttcattttgtaatactgcaaaaacggataggcttcatcatacaacgctgtaaataaataaatcatcgcttctcctcatttttgatttcttactaattctgtgccttaacctgttcaaatttttcaagcacttcctgttccggtcctccggttacaaggctgacaacaacaataactgctacagctacgataaatgccggaagcagttcatagattgcaaatacgccgccaagctttgcgatgacatatttccacaggaaaatcatgacaccgccggataccatacccgcaagaacaccgtaacggttcgcacccttccagaataaagataccagtacaaccggtccgaaggttgcgccgaagcctgcccatgcaaaagatacaatatcaaatacagagctgtccgggttgcttgccataaatacaccgataacggcaatcacaacaacggtgattcgtgccactacgatggacattttctcggtaatcttaatgtgaaaacaatcttttacgaggttttgtgatactgcggaagccgccgccaaaagctgtgaatctgccgtagacattgttgccgcgagcataccggcaagaatcagtccgccgataatcgccggaatcgcaccgtatgtactcaataaatgtgccacccgtacaataatcgtttcagaattgctgcctgtcagcacttcaattgcgcctgcctttgacatgctgtaacctacaataccgataaatacaccaattgttaaagaaatcacaacccagacggttgccacacgtcttgaaatctttaatttattttcatcttcaattgccatgaagcgaagcagaatatgcggcataccaaagtagcccaatccccacgccattgtagaagcaatacttaaaaagctgtatttttccgcagattgtgtttctaccgaatagctgtggaagaaatccagataacccggaagctgccttgcattatctattaccacatctaatccacccgcaacattgataccgaataccactacaaccaccagcgcgattgtcataacaatactctgaatcaaatcggttgtacttgctgccagaaatccgcccaatgcacagtagccgacaatgactgctgcactgattatcatggctgccatataattcaccccaaacaggctggaaaacaacttgccacaagctgcaaaaccggaagccgtatacggaatgaagaagataataatcatcagtgccgcaatgcctgtcaggattcctttcttatcaccgaatctttttgcaaagaaatccggcacggtaaatgcctcataggctttggaatacacacggattcttctggctacaatcagccagttgacatatgtaccgattgcaagcccaatggctgtccatgctgcacttgcaacaccggaaagataggcaacacccggaagtcccattaacagccagctgctcatgtctgatgcttccgcactcatcgctgttacaaacgggcctaattttctgccgcccagataaaaatcatcgacgctgttattctgcttcgagcagtaaaaaccaacacctaacattgccgcaagatatataagaatcgcggccataataataatttgtgacataattctacctctttttttcgatttaaaccataaaattataacacaaattaaaatttcagtaaataaatattcgacaaatcaacaaaaaagctgccgcttttcaatctgtgtatctgaatttccgactgtgttctgtccggatttcaggttttgattgatgaaagcagcagcttttctattttattctattactttttatgtattattcgtataatggatacttgtctgttaatcccttaaccagttccatcgcctttgccttatttgcatcgacatcttctacaagcattgcgattgcatctgctacaatatccatatccgcttcattaaaacctcttgttgtaacagctgccgtacccagtctgataccgcttgttacaaacggagaagccgggtcattcggaatcgtgttcttgttacatgtgatgttggctgcatctaagagcttttctacttccttacctgtaactcccttactgattaagtttacaagcattaagtggttgtctgtaccgccggaaacgatatcaaatcctctgttcattaatccgttgcagagtgcctgtgcattctttacaacattttctgcatacgtcttaaagcttgggtctaaggcttcctttaagcagactgccttacctgcgataacatgcatcagcggaccgccctgaataccagggaatacgctcttattgaacttgaacttttcagcagcttctgctgaacttaaaatcataccgcctcttggtccgcgcagtgtcttatgggttgttgttgtaacaacgtctgcatacggaatcgggcttggatgtgcaccacctgctacaagaccggcgatgtgtgccatatctaccattaaatatgcaccgacttcatcacagatttccctaaacttcttgaagtcaataacccttgcatatgcacttgcacctgcaataatcatcttcggcttgcactcttttgcgattcttaatacttcatcatagtcgataaagccttctgcggttacaccgtaaggtacgatgtggaaatacttacctgaaatattaaccggtgaaccgtgtgataaatgtccgccgcagtcaagactcattcccataacggtatctcccggctctaccatagcaaagaatgctgctaagttagcctgtgcaccagaatgtggctgaacattggcatattcacagccgaataacttctttgccctttctattgccagtgtttctactacgtcaacatactcacagccgccgtaatatctctttcccggatatccttctgcatacttattggtaagcggactacccattgctgccataactgccttacttacgagattttctgatgcaatcagctcgatgtggcttctctgtcttgcgagttcgtcatccatcgcttttgcaagatccggatcaaaacttgatacttcattgaatgaatacat

SEQ ID NO: 111 - DNA, 10054 bp, unidentified
  source 1..10054: mol_type = unassigned DNA
atgaaaaacttatttgacatcaaagacaaagtagtggttataaccggtggaacgggagtattggggaaagccatcgcctttcatctggcagaagaaggtgcaaaggttgttgttttaggacgcaaggcagaaacaggggacgccattgccagagaaatcaaggcaaacggtggagaagccatgttcctgacaaccgacgtgacgaaccgtgaactgctggaacagaacctggctgatattctgaaaacctatggacgcatagatgccctgctgaatgcagccggtggaaatatgccgggtgccaccatcgcgcctacgggtacattcttcgatttgaagatagaagaattccaacgggtgctggaattaaacctgaccggtaccgtactgcctacacaagtcttcctcaaaccaatggtggagcagaaggcaggcgctattgtcaacttctccagcatggctgctttccgccccatgacgcgcgtagccggatatgctgccgcaaaagccggtatctccaatttcacagctttcatggctacagaagttgccaaaaagtttggcgaaggtattcgtgtaaatgccatcgcacccggatttttcctcacagagcagaaccgtgccctgctgacgaacccggatggaagctacacggaacgtgggcaagatgtgatccgccaaactcccttcggacgtatgggccgtgcagaagagctttgcggaaccatccaatacctcatcagcgatgcttccagctttgtcaccggtacggtggctgtagtggacggagggttcaacgcattcgcgatgtaaatagtaaattgcaaatcatcaaacaataaataacatgattctttgtgaacaaacctggcgctggtacggtcccaacgacccggtaagcctttgggacatcaaacaagccggggctaccggcattgtaaacgccttgcatcatattccaaacggggaaatatggacagtagaggaaatcaagaaacggaaagaaatgattgaagccgtcggtctgcgctggtctgtagtagaaagtgtacccgtacacgaacatatcaagacccaaaccggagacttccagaagtatatcgacaactataaagagagcttgcgtaacctgggcaaatgcggcattcacattgtcacctacaactttatgcccgtactggactggacacgtaccgacctcgcctacgaactacctgacggcagtcgtgccctccgctttgaacgtgccgccttcatcgccttcgacctcttcctgctacatcgccccggtgcagaagccgaatacactgacgaggaaaagaccaaggcccgtacccgcttcgaacagatgacggaggcagacaaacaactgcttgtacgcaacatgattgccggacttcccggttcagaagaaagcttcaccctggaacagttccagcaggaactggaccgctacaaaggcatcactccggaacgcctgcgtgccaacctgatctatttcctgcaagaaatcactccggtagccgacgaagcaggtgtcatgctcgttatccatccagacgacccaccgtgctccatcctcggcctgccacgcatcatgagctgtgctgccgatttccaggcactgattgacgctgttcccaacaagagcaacggcctttgcctctgcaccggctcactcggtgtaagcagtgccaacgactgtgcagccatcatgcagcagtttgccgaccgcatcaacttcgtccacctgcgcagtacgcaacgcgacgccgaaggcaacttctacgaagccaaccacctggaaggagacgtggacatgtatcacgtgatgaaagccttccttgaactgcagcaacatcgtggcgtctccatcccaatgcgccctgaccatgggcaccagatggtggacgacttgaagaagaaaaccaatcccggctattcctgtatcggccgcctgcgtggactggcagaacttcgtggactggaaatgggtatagccaaatcgctgtacgaataaggcacaagaaatagcaagcataaggaaagaacaggaagccctccgtccgaaacttcaaagtttcggacggagggcttccctttataagttttctgccatcagccgcctcttcttaaggcactgtctgccggcatttatttaccttcttttgcagcaagcactttccatacaacggcactcagcgcagcacccacaaacggagctacaatgaacagccacaactgagagagagcctcgccaccctggaacagtgccggaccgatgctacgggcaggattgacagaagttcccgtaacaggaatacaaacaatgtgcactaataccaacgtaagaccaatggccaatcctgcaagattacccgcccccttctcggaatccgtagaacctaagacaaccagcacaaagataaacgtgaacacagcctctgcaatgaatgcctgcaacatcattccgtcagcaaacccattggaaccggtagccgtaggaccgccatgagcgcccgtagacaccaatgcataaagaatggcagaaccgataaccgccccgataacctgaaacaccatatacatggctgcatctttcccgctcatcctgccggacaacagaacgcccagggtaacggcaggattaatatgacatcccgagattcctccgatagcgtatgccatcgccacaacggacaagccgaaagcaaaagccactcccagcgttccgacacctgcactaaccgcccccgcctcacttccggcaaagacagcactaccacatcccatcaggacaagaaccattgtcccgatcatttctgctaaatacttcttcatgatagtttttattaaacattgatttctgcaaaaataaatataaaagatgaaaatctgcctaaacacggcggtaaaaactcacccattactacaaaacatcactgctttgattctaacatccagcatatctgcatcttctttagccaacccgaagaaactcagaaatataagaaaacatattggcttgtaaagagtacaaagaaagggtgcaacctcacggccacaccctccatctacactatctttgataataacctaaaaggaaactttatttccctacatcatttcaattcaaaaggaaccgttcccttcacatcggctgccgaagctgctatgacagcctcgaacttacccggctcggccacccaagcgtgctgggtgtcatcgaagaagctaagagcctccttatcaatggtaaatgtgacttcctttgtttcgcccggagccagtttcaccttttggaaacctttcagttccttgacgggacgaggcagagaggacttcttgtcactgatgtacagttggacaacttcctgcccttcgcgcgctccggtattctttacagaaaccttcacggtcagcgtaccgtcggcctgcatggtcttgctgtcggctgtgggcttgccatactcgaaagtggtatagctcaaaccgtggccgaaggggaacaacggtttcaccttcttctgcttatcggcccaacggtaacctacaaaaatactttcattgtatttgatgtcgatgatgtccttgctccgcttgccggtatattcacccaggctgtgggccgggcaatcctccaacttcacggggaaggtaaacggaagcttgccactgggattcacatcccccataaggatagcggcgagagcactgccggcttcggaacccagataccagtcctgaacgatagcaggcacttcgttcacccacggcatggcaatggcattgccagaaatgttgacaacaatcagattcttgtttgcctttgccagtgcagagataacagcatcttgtccgtaagacaaacccagaccttcacggtctgaatcctcacagtcctggccgttgcttttgttcaaaccgccgatgaagattacataatcggcatcctgggcttctttcacggcttcggctatcagttcttcgggagtgcggtcatccttcaggttctgtccagtcaccacaccattatactcaccgcttgcatcgcccacgtagccacgagcatacaccacttcagccttgccagccacacgctgcttgataccgtccaacggagaaagctcacgctgcaccttcagcgaagaactgccaccacctacagtcatcatcttgatagcattttcgcccactaccagaatctttttagtctggtccaaatctatcgggagcacattgcctttgttctgcaacagtacgatgccctcctcgccgatgcggcgggcagcctcgtaatgctccggagaaagcatacttccccacggacggtcgggattcatcactgtacggaagataaggcgcagaatgcggcgtaccttgtcgtccagctccttagtaccgaccttgccttcgcgtatgaggttcaggtagggattcgccagataataattgtcgtatgcattgctggcaccatttgaaagtccgttagtccaactgccgaattccatatccagcccattggtaatggcttgccgagtatcgtgcgtgccgccccagtcggaaatgactacgccgtcgaatccccattcgcccttcaatatatcgtttaatgtgtattggttgtggcaaagatgttggcctttgtaaaggttgtaggcacccatgatgctccacgctccaccttcctgcacagccatcttgaaggcaggcagatagatttcataaagggcgcggtcgtccacgatgacattggtggtgtgacggttcacttcgtggttgttcaaggcaaagtgtttcacgcaggcagccacaccattctgctgcacgccccggatatagggcactaccatctttccggccagataagggtcctcacccatatactcaaagttacgtccgttgagcggtgtacggtagatattgacaccggggcccagcaagaccgatttgttgcggtagcgcgcctcttcaccgatactctgtccgtaaaggagagacatttcggggttccaggttgctgccagacaagtcaaggcagggaaagccacacaggagtcattggtgcatccggcttgttcccactcgtcccacaacacatcgggacgtataccgtgagggccgtcatccgtccatacatcgggaatgcccagacggggtacacccgcactgctgaacttgctttgcgcatgagtcaacttcactttctcttccagggtcagacggctcaaagcgtcttccactctttcttcaataggtttgcttgcgtccagatagacgggcttctgctgggctgaaagaggcagcgcgacagcagccagaaccaaaccgaataatacttttttcattgttgtacaatttaagttgttatataatttaagtaagtactcataatcagtccgtactattgacaatccccagcagacaagggaatatgacttatccctacacacataggaactgaaatccttacagccgtatagtgaatatctataacatccggatgttgttgtccaaaacatccccatgttttaccccaaaacacccggatgttttatcccaatacatccccatgttttgccctaaaacatccggatgttttgggttctcagtcctatagtgtgtacagctcagtccctacctctttcatgctaagtcccggcatctcatcctctgggacttgatacgtactgtttgcagcgaggcaatacccgctacttcattcccaatgaccggatataaccctcctgaaccacacaattcttcagtttgcatgcctcgataaagtccatcatcgccttgcgggacatggcctgcgcgggacgtgcctcacggatttccttgtacgtggcacgcggtgcttcggagaaatacacgatgtttgcccagttctccggcggagtgatgccgacgaaagaagaaccgtccatcttcttgtagggccagaaggtatagccgatgttgttctcgcgcatcgtctggcagaaagcggcctgccattcgtccgtattgtggcctatctcacccatgtacatgggcaggttcacactgtcgcggaagttgataatcgtctggatggcagcttgggtaggttcgcctccgtaacggtggcaggtgtacattatcttgtcgtcgaacttggagtccttgaaaggcttgaaattaccgttccattgcgaaccgcccagcaggatgatgtggttgctgtccacctcgcggatggcggctacacctttcttatatacatcttccagcttgccgttgagctcctccatgttctcgaagtaaggggcaatgggctcgttgaagagttcgtaaccgaggatgaccggttcgttcttgtagtggtcggctatccggcgccagatgtcacagtaaagttgctggctgacttcgctgtcgaacagccagggatagccgtagctgtcgtcgatgttgtcgcccgtctgtccgccgggggcgtcgtgcatgtcgaggatgaggtacaagtccgattcgcggcaccactctaccaggctgtccacgcgggcaaagccgtcttggtcggcagtcagccccatatagtcctcgtccgtaaacattttgtaatggaaaggcaggcggatggtgttggcaccctgctccttgatgaagcggatgtcctcgcgcgttacataattgtccttgaatgctttccagaagtcggccgtaaagtccggtcccaccagctggcagaacatctcattgatgaaacgagcggaattggtcttgttgaacttgaacatgtatccttccggattcagccagttacccaggttggtacccatgatgaagagtttggtaccgtcgggctttatcaagtcctgaccctgaatggttacgaatgcatccgaagttacttcttttgtcgcttgtttctcaccgcatcccgcaaggcccaaagacagcaaggcgatggaaatgcttgtcgctaataaatgtttcatggcaataattttggttatggtattagttgcgatattcgcttttacttccccaaagttaggaaagataagaacacctcgtaccggcgaatcgggaataggtggaagaagtaaagaagcacaaacaaacaaacaactaataatcagaaatataagtagaagaagagaaaggcagaaagtggattcaaaaagccggtttgacgtattgtcagcgtatctgcatcagccgtatttcaaagtcctcgcgcgaaatgcgggccttgttcttcactttggcacggtaattatagatggtgtttacggaataacggaggaattctgcaatctgcgaactgtcgtcgatgcccagacgaatcaaggcgaaaatgcggagttccgtatttagcaactcgcctttacggagcacgatgcgttcttcgggctgcagcaagtcattgaatttatcgacaaaatcggggaaaaggtgcaagaaggcagtatcaaagttatcatagagttccttcagtccggtgtccagcacctcacgggaacgcaccatcttcagcagctcttccatctgcccggcagagattttcttgttgaccatccgccggtaggtatccagccggttgatataaacggagcagagattcatgaaacggcccacatactcctccttgatgttgtttgagagttgcagttgctcgttggcatgctccagtttgttccgtgcggcagagagtcgctgcatctgccggtagataaagcccactgccaccaccaacagcacaatcaaagtgctgatgagccagaggtacagccggagccggtcattctgcttctcgcgcatggcctgataagtgaggtctatcagtgaaaggatgccggcagtctggaggctgcggctacgggcgttgtatcggttggtttcgtcccacgagaaacggatgtaacggtaggcatgctccatatccccttcctcataaagaagttccgccaggttccagagtgaggcatggtctgtgatgctcaggcgaatatcggtcagtgccgacaaagccagatagcgcttctcctcctcccggttcccgagccggcggtagagcaatgagcgctgataggtcaccagcgcatattcgggagtattgggcttggcatgtgccagacgcgtatcattgatgctcaaggcttcgtccggatggcctgcagcggcctcccgcgcctctcttcgttccaggtagagggaggatgaaggcagaagtacctgcatcaaagaatcgtcataatgggtagccaaagcctgataatgcttcttgaaagaatcgtccagcgtatagaaactcagttctgtgtaaagtttatgacaggcattgtaatagtccggcagcagatgggagggaagggaagctttgtccgtctgcctcaagagttcggcagcctcctcgtacatacctgccgaagccatcagatgggcaagctccagccttgtttcgagtaccgcatcctgccggccataacgctctgcccaatccagattgacacgaagataatggatggccgaatcgcagatatatgtcttatactccttatagatttccccattccatcgaaaaaaagagatattggcggtatcggtatccagcacttggcgcttcagccgggcaatgcgtccttcacgcacggcgacatagtgccggtgcgcctcgatagcctcatccaaagaggacgtcagcgcagtaaaagagggcgtgccggcagcaaaaaccacactttgccataccacgacggcaagaaaacaaaaagtgaacaatctcctttccatgaccataaagttcatgcaaatatagcaagaaatcctgcaaagcagtagcatcggaaaaaatagtttcctatatttgcgttctaaacccccaaacaaattatctatcatgaaaagcttaacaccccaacggattgccgcggtagacgtattccgcgcactcaccatgttcctcatgctctttgtcaacgacattcccggactgaaaaacgtcccccactggctgatgcatgccaggatggacgaagacatgatgggattctccgacaccatcttccccgctttccttttctgtatgggcatgtccgtatcctttgccatacaaaaccggtacaaaaagggagacaacaccctgcaagtcgtggcccatatcttctggcggacagtggcgctgattgccatgggactgttttcactgaacagcggaggcatcgaaggcggtctatcgcaccaatggttttccatcctgatggtcatcggtttcttcctcacctgggaggtatatcccaaagcggaaggaacgaaaaagacccttttcaccgcaatgaaaacagcaggcgtgctgctgctcgccttcctcgtcatctacaaggacatgaacgggaaaccgttccagataagctggtggggcatcctcggacttatcggctggacgtatgcggtatgtgcaggcatctatctgttcacccgggaaagcctgcggaagaatgccattgcctggttcgtggtcgtattgcttgccgtagtcagccattcagacttgatacctggagagtacggcagccggattatcctgcttccctttatcccgagtgactggacgctgcatgccttcggtatgtccggcgtattgacctccctgctcatgcagcgttatgccgaccgggaacggccgggacgattcatcggcatgctttgtgccctcggcgtaggaatgcttgtccttgccctcgtctcacacccgttctggattatatccaaaatacaagccacgccgacatggttgttctactgcctagccatgttcttcccgctgttcggtttcttctactggctgacggacgtgaaaggcaagaccaactggttcgatatcatcaaacctgcaggtacggcaacgctgacctgctatattatcccttacatctggtatgctgtccagcaactgctgcatctgcactatcccgaggcattgggaagcggtgtaccgggactgctcaagtccctcgtgttctcgcttgtcattgtggggctgaccggcctgctggtgaaaggcaagattaaactgaaagtataa

SEQ ID NO: 112 - DNA, 6537 bp, unidentified
  source 1..6537: mol_type = unassigned DNA
ttattttctcccgcgctgcaattcaatccaggccaggtctccgcgctccaggccgtggatcaaaacctcggcagtggcaatgttggtggcaacggggatggcgcgggtatcgcacaggcgcagcagggtaacggcgttcggctcattgggccgggcgttgacggggtcgcggaaaaacagcagcatatcaatttcgccgcaggcaatcatggaggaaatctgctcggcaccaccgcgtgcaccggggtacaggcagcgaaccggcagcccacaggcatcgtgtaccactttgcccgtcacgccggtggcaaccagttcgttctgagacagaatacgcacataggctgtgcagaactgggccaaaagctctttgcgggaatcatgggcaatcaatgcgatcctcaaggtgggtgcctcctataattagttatttatataatatcatagaatagattgctgaaaaatgcaagccacctttggttaaaccacccgctaaccccgaaaaagcgtgcagtgttaccaaaaaactttacacgattttggcaaaaccgctttgtgcgaatgtgctataatatgtacaataaatacataacctgtaaggcaccaaaagcgccgcacaggcaaaggaggaaaaacgctatgaaaaaatccgcacagaccgtcattcgggaaggcgcctgctatactatcgctgccgccaatggccgcgtgctggaagttgccgatttcaacaccgagaacggcgcatccatccgcctgtggagctatgagggtcagccctggcagcaatggatttttgaggaagccgccgaaggccagtaccgcatcaaaaaccgctttaccggcaaggtgatggacctggccatgagtggtgttgtgaacggaacctgggtgcaccagtgggagaaaaccaccggcaagggccagcggtgggagattgttcccgccgatggcggcaaggccaagatccgcaatgtgctggctgataaggttattgacctggtaggcatgcgggttgataacggtacccaggcccagatctggcaggatgtgtttggcgaaaaccagctgtggagcatccagcccgtgccggataagctgctgcaaaaggatatgccaaagccggaacccaagaaaacggcccccaagtccacccgcacccagaccggcaccggccgcgccaaaaagaccggcggcaaaggcggacgccgcgcagccaagtaaagcagagaaaaccgaataaataaaattgaaacagcccgctcatccggcaacaaacggatggacgggctgttgcggttacattttgaaagccaaactttactggcggatcatgcggtagccaacgccgatgtgggtctggatatagcgggggtggctggggtcttcctcaatttttttgcgcagcgttgccataaatacgcgcagggacggcgtatccgatgcggccgggctgccccagacttcgttcagcagatagttgtgggtcagcactttgccggtgttcttggccagcacgcagatcagcttgtactcaatgggggtcagatgaatctccgttccgccgcggtacacacagcctgcggcatagtcaatgcgcagttctccattctcgtatatgctggcctggtcacctgcgcgggaagtatcataccgcacacggcgcagcgccacgcgcagccgggccaaaagctcctctacgctgaacggcttggtcaggtaatcatctgcaccggcatccagggcggatactttgtcggtatcatcactgcgggccgaaaccaccagaatgggcacgttgctccacccgcgaatcttgcggatcacatcaataccgtccatatccggcaggccaaggtccagcaaaattacatccggccgtgccgaagcagcttccaacagggcaccggctccgttctgtacacggtggtactgataattgcgggtttccagtgtggtggagatcagccgtgcaacagccgggtcatcctccaccacaaggatcagcggtttattcatacagggtcacctcagttcgcgggagtgtaaaacggaagcaggcaccgtgcggtgcagcgttctgtacatcgatcacaccgccatgggcggcaacaatggaacggcacaaggccagcccaagacccagcccgcggcggccatcgctgcgggttttgccaagggtataaaacatatcaaacagcttgtcacggctttcttccgggatgccggggccgtcatccgttacgcagatgcggacaaatttaccctccggcgcggcgaaaagctcgatgcgggaatgttcgggggtatatttgatggcgttgttgatgaggttcaccagcacctgctcgatcagctgggcgtccatatcggccatcagcaggtcatccgccacgttggtcacaatggtgtggcgggcggcgtcatggtctaaatgagccagtacatcgtcaaaaatgtcttgaatcagctccggctgaatgcgcaggtttacctggccgttctccatccgggtgatggaaagcagattttccaccagatggttcagccagttggcgtcctcataaattgcggcagaaagctcccggcgcttttcctcggtcagcaggggatttttctcggtcaaaatcagcgcgttgccggaaatgcttgtcagcggggtgcgcaggtcatggctgatgctgcgcagcaggttggcgcgcagctgttcctggcgggcggcttcctcaatttcgcgccgggcgcggttggaggcttctttttccagcgccaaggaacacacatccaggatggataatgccagattgtgctcataggtgctgaactcatgcagcgccgggcaactgcggtaatccgtctgggcgggagggggcagaatcagggttcccggtgcaatgtgctccggtgcgggggcaaagcagaccgggcgctccaacagcttgcccagctgggtggccgttatccgcagaatggtgtcagggtcctcggctcccaacaggctgcggctggcttccagcagcacctgcgaagcataggctttgcgctcgctttgggcggcctgtaccttgatacgccccgtcagcgaggagcagagcaacgaaacgcagagcatgaccactgccgttaccatgtcgtctgaccggatgcggaactgcataaaggggtcaatgaacatatagttgaccagcatcaccgagaacagcgaagccacaacgccgtacaccaaccccgatgtaaagacgttgatatacatgacgcccaggatataggtcaggatatagttggaagaaacaaaatccagccggaaaaatacccagcttgtcagcgtacacagcgcaaggaccaatgcggtcagggcgaagtcccgcagccaaagcagggcaggtttgcgttgcggcatgggtgcaggctcctttccactacagggcagggaatgcggcaaggcggcccagcactgtatttatcctatggcaacaccgcacaattcccgccttgcggcttaagcaccgctccggcagctgcggcacggcatctgcgttgccaaaatgctcgataagacatccagtattatctgcgcttttggcttggcatctgccgcacctcgctcgccgtatcggcacttagaattatgcggtattgccctattataacatattgccgaactctttgatacaaacggaataatctttatataaatttaatgtgggcctaccctatccgcggcagccccggcacttttttgcacgctgggcggggcattggttgaaatcaggccgcaaatcggttatactattttgtaataattggattgttctgccctgcgggcggtattgccatataaaaaggagtgtttttacaatgtcccataccgttatggtgaccggtgccgatggctttatcggcagccatctggccgaagagctggtaaaaagcggcgagaaagtgcgtgctttctgcctgtataactcgtttggttccctgggctggatcgataccctgcccccggagatccgcaatgaaatggatatctttatgggcgatgtacgtgaccccaacggcgtgcgtactgccatgcgcgggcaggagcgcgtgttccatctggctgccctgattgccattccgttcagctaccacagcccggacagctatgtggataccaacatcaagggcaccctgaacgtgctgaacgccgcccgcgagctgggcacccagcgcgtgatggttacttccaccagcgaagtatacggcaccgcccagtatgtgcccattgacgagcaccacccgttccagggccagagcccctactctgccaccaagatcggcgcggaccgcctggctgaaagcttttaccgcagctttgacctgccggtttccattgtgcgtcccttcaacacctatggcccgcgccagagcggccgcgccatcatccccaccatcatcacccagctgctggccggccagcaggaaatcaagctgggcagcctgacccccacccgcgactttaactatgtcaaggacaccgcccacggctttatggccattgcggactgcgatgctgccattggccaggaaatcaacattgccaccggcgtggaacattccatcggcgatttggccaatgagctgattgcccagatcaaccccagcgccaggatcgtctgcgaagccgagcgcctgcgccccgaaaagagcgaggtcaaccgcctgctgggcgatgccaccaagctgcgcaccctgaccgattggaaaccgcagtatacctttgaacagggccttgccgaaaccattgagttcctgcgcggcaacctggaccagtacaaggtcggccagtacattctgtaagggcggttgtaaggaagttttatgccaataaaattacaaaagctgcccgccgctgtgcggtgggggctggctgtgctgtgcgccgccgtgtgcggcgtgctgtgggcctattactggcgggtgttctttgggctggacagccgtgtgtcccccctggtggttacactggggtgtgcggcctttctggaagtatgtctgctggccgggtattgtgtgcggcggtttgcaaaaggatttgcggcaaaaggggccgtgtgcatctttttgtgcgggctgctgtttgcatttgccaacccgccgctgcaaacgccggacgaagctgaccattacctgcgcacctatgccatctccaccgggcactttgattttgatgcttcccgcacctacccggacgatgtggcatacctgctggaagcgttccccggtgcatgggtgaatgcgcatacctctgccggtgtgggcgctgaccccgataccggggcggaaaaagcctataacaccgcgggctatgccctgaagcaatacggcaaggacggcgcagtgcagagcatggcggacagctttgccctgtacctggcgcacgatgtgcgggattctgtgccggacccagtcagcgagccggtcagctttctggtcattccattcctgccgggtgcggtcggtatggtgttggcacgcctgctgggctttggcgcgctgggctgcctgtatggcggacgcatcgtcaacctgctggcctacacgctgttgtgcgcgttggcgctggccaaagcggagcgttaccgcccggcctttgcggccattatgctgctgccgatgtcgctttttatgggggcatcactgagctatgatgcaaccctgctgggctgctattacctgatgcttgccctgctgacccgcagggagtggaacacccaaacggcgggtatttacaccgccgcctgcatctttgtcaatatcgccaaaccgtacctgaaccttttgtgggtcctgcctatctttttggtggcaaagcgggaatggcacgccaagggacgccgcccgctgtgggcactgggcagctttggcggtgctatggccgttaccctgctgacggaatggtacggaacggcgttccgctataactatcccatgattgagcgccagggcggcagcacggtaaacggcggtgaacagctggcctttgtgctgcgcaaccctctgcggaccattgctgcgttctgggggaccctgggagagaatgatttctttattgggcagctcggcctgttcggctggaaggacctgcccatcagctttttgaacctgaccggcccgctggtgctgctgttggccgccctgctggctgctgcgcagccaaaacgcgccgatgcgttccccacccgccgccgcgtgggcggggtggcgctgctggcgctggtgtacgccgccggtgccatggcagccatgtatatcacctataccccggtgggcatggtgcgcattgtggggctgcaggcgcggtatttcctctgcgtctggctggcattgctgcccgccctggccgtactgctgcgcaaaaccatctgccccgccatcacggaagaaaaggccgaagcgaccatcaccccgctgtgcgcctgctatgccgtttttggcgctgtgctgctcttccagcactactttgtggggccggtgtacgtcgtatacgcgtga

SEQ ID NO: 113 - DNA, 12543 bp, unidentified
  source 1..12543: mol_type = unassigned DNA
atgagaatcgtggtcgtcggcctcggcaaggttggccgtgccctgaccgcccagcttacggcggaaaataacgacattgtcgtcatcgaccaaaaccctgacctgatcgaggacattgtcaatatttatgacgtgcgcggtctggccggcaacggcggctgctatgacgtgcagaaggaggcgtttgaggacggcgcagacctgctgatcgccacaacgtccagtgatgagagcaacatcctggcctgcctcgtcgccaaaaagctgggcacgcagcacacgattgcgcgtatccgcaacccggagtatgagaagcagctgcgctttatgcgcgatgaccttggtctgtcgatgttcgtcaacccggaaaaagccacggcgcgtgagatcgcccgcgtgctgcgtttcccgtctgccatcaagcgtgagcagttctgccgccagcggtttgagctgatcgagtaccgcctgaccgacgacaacccgctggtgggcttgcagctgtcggacctgtaccgcaacatccgggtcaaaattctgatctgcgccgtcgcccgcggcagcgagacgatcatccccacgggtatgtttacgctgcgggccggggacaagatctacctgacggcctcggcccgggatctggaatccttcttccgcaagctgaacctgttcaaggccaaggccagcaacgtcatgatcgtcggtgcaagccggatgacctactatctggtcaaggagctgcaggacatccagaagcgggtgaccgtcatcgacagcgatgcggcccgctgccaggagatgagcgagaagttccccggcgtgctggtcatccacggcgacggtgcggatgccgagctgctgagcgaggagcgcatcaccgatatggacgcctttgtggcgctgaccggcctggacgaaacaaacatcattctggcgatgtacgcctcccagatgaactcctgcaaggtcgtggccaagatcaaccgcgagtccttcgccgagctggccgctgccaaggggatggtggacagcgtcgtctccacggcgtcggtcacgtcggagtccattgccatgtacgtccgcgccatgcagaacagctttgagtcggagaacatcaagacgctgcaccgtctggtgggcgggcgcgtggaggcgctggaattcaacgttgcgccgggtttgccgttcatcggcgtaccgctgaaggatctgaccctgcgcaaggggctgctggtggcgggcatcgtgcgccgcaatggccagacggtcatcccgtccggcaacgattccctgcaggagggcgacgatgtcgtcatcgtcaccactgacacaacgctgcactcgctgcgcgacattgtaaagtgagggcgcagccatgaactataaaatggtagggtttgtgctggggcgcatcttcctgatcgaagcagccctcatgctctttcccatgggctgcgccgccatctacggcgagtggagcgttgtgctttccttcctgtggccggcgctgatcgtgctggcgctgggcctgatgaccagcctgcgcaccccccaaaacacgaaaatctacgcccgcgacggcctggccatcgtggcgcttgtctgggtgctgatgtcggttttcggcgcactgccgtttgtcatctccggcgagataccgtcctttgccgatgctttttttgagacggtctcgggctttacgacgacaggctcgacaattctgaccgacgtcgaggcgctgagccacggcacgctgttctggcgcagcttttcccactggatcggcggcatgggcgtgctggtctttgccatggccgtgctgcccatgaccgatggccgtgccatgcacctgatgcgcgccgaagtccccggcccgacctgcggcaaaatttccagcaagctgagcgacagcgcaaagattttgtatgccatttatctggtcatgaccgtcatcgagacgattttgctctgcgcgggcggtatgccgctgtttgacgcgctcattcatgcgttcggcacggcgggcacgggcggcttcagcaacaaggcgctgagcgtcggcgcgtacaacagcccgtattttgagatcgtcatcggcgtgttcatgctgctgttcggcattaactttaacctgtattatttcctgctgctgcgtcatttccgtgaggcgttcgcctccgaggagatgcacgtctacttaggcatcgtcgcgttctcgacgctgacgatcacggcgaacatcgcgagtatgtacgacagtgtcggcacggcgctgcgcacggcgttcttccaggtgtcatccatcgtcacgaccaccggctacgccacggcggacttcaacctctggccgacctactcccgcatcgtgattgtgatcctgacgtttgtgggcgcatgcgcgggctcgacggcgggcggcttgaaagtatcgcgcgtcatcatccttttcaaggcggcacggcaggacctgaacaagatgctgcacagccatgccgtgacgacggtccgctttgagggcaaaccgctggacgaaaagacgctgcgcggtgtgcacaactatttcaacatttatatgctgctgctgacgctgtcggtgctgctgctctcgctggacgggttcgatctggtgacgacgtttacatccgtcgcgacctgcctgaacaacgtcggtcccggccttgagatggtcggcccgatgggcagctttgcggatttctccgctccggccaagctgctgctggcctttgacatgctggcgggccgtctggagctctacccgatgctggccctttttgccccgcgcctctggcgcaagcgcatcaatgcgatgcacgaggcaagagcgaagtaaggggcgggtgttctttctttacaaagaaagaaccaaagaaattccaaaccaatacaatcatagaaccgggcagctgccatctttacggcagccgcccggttttggtttatgtatggacgtttcgggggtagagtgtagggcggccagccctctggccgccgcaaggggcgtactgccttgcgatgccaatctgtttttaaagggggctataggcgggaaaaatgtgagtatccccacaagctggaatttgacactttgtatttatcgagaatactcttgaaaccattttgcaaagcgtgatttattgaaaataatgaatttatatagttctccatttttcatattaactgttgcaattggaaagactacccacttccaagagatttcttttatttcctgcatcggcaaaactaaatttctgtattttttgtcaactgtaagcttgtttgtcttgtaagtaagcgactgactatcgaggtacagacctcctccaagtatgccattgtgacacaaactgcaaacaaaagatttcatagaaacatccctccattaaattgcgatttaccttattataccacaccccgccgctgcgtgtctatttcccgccgtgcccgcataccctgtaccaaaccacaacaggggaggggcttgccatgcggcgggatgcagacagagaggaacgaaacgcaagattgctggcgggcgtggtgctggcggctatgttggtgctgctgtccggcatcatccatctgctgtaccaccgggagtacgccgagacggacacccccaacgactgctttgcggtgtcggcggcgacgggggagacggcgctgcccaaaatcgtctgcctgacctttgacgacggccccagcaaaaacacccggccaattctggaaattctcgataaggagcaggttccggctaccttctttgtctgcgcgcaggacgccaacgaaaaatatctgccccttgtggcggacatcgcggcggcgggacatcagatcgcgctgcacagcgcgacgcatcaatactccaaaatttatgcgagcaccgacgcattctggcaggacatcagaacgctgcgccaggcgttggagccgtatgtggatgtggcggccatcgactggctgcgtttccccggcggcagcacaaacacagtcagccaccgctacggcggaaacggcatcatgaaggccctgaaggcccaggccgaggacaagggctaccactggatcgactggaacgtctgcgccgaggacgccaccgccagccacccggatgcagcgcagattttgcgcaacattcgccgcgatgccgatggtcaggacacctgtgtcgtcctgctgcatgatacaaaagcaacaggtcagaccgttaaggccctgcccgatatgatcgcctatttccgggaacagggctacaatttttgtacggttgcacagatggatgccttgcaatgtgaaacaaaatagggtataatgtacaagaatcgaaaaacggtgggaggcggaacgatgcgcaaaacggaaagccagaagatagccctctgcggtatgctgggggcgctttcggtggtgcttttgctgctgggcagtgcactgcagatcggcacctatgccgcgccgatgctggcggcgttcctgctcatcccggtgctggaggaatacggcacgcgctacgcgctgaccctctacgtctgcgtggcaattctggccgtgctctttgtgccggagaccgaactggcgctgttttacgtgctggtcatggggtattaccccgtgctgcgcgtcaagctgaacggcataaaaagcacgctcctgcgctgggtgctgaaattcgcggtgttcaacgcgggcacggtgctggtgtatcttttgctgtttgcgctgctcgggcccgccgtgctggacgagctgctggccgacggcgtcgggatgctggcagcactgctggccgcgggcaacctgtcgttctggctgtgtgaccgcgcactggcggcactgacgcggtattaccacgtcatactcaagccaaaactgaaaaagaagttttaattcggggaggaaaacaacatgtggtacgatgaggcagtagtttatcagatctatccgctggggctttgtggcgcaccgctgcaaaacgacggtgaccaggcgcaggcgggcgagcaccgcattctgcgggtgctggactgggtggagcacatcaagcgcctgggcgcgacctgcgtgctgttcaacccgctgttcgagagcgacgcccacggctatgacacccgcgactacaataaggtggactgccgcctgggcacaaacgacgacctcaggcaggtctgcgcggcgctgcacgcggcgggcataaaaatcctgtttgacggcgtgttcaaccatgtgggccgtggcttctgggcgttcaaggacgtgcaggagaagcgctgggacagcccgtacaaggactggttccacatcagctttgacggcaacaccaactacaacgacggcttctggtatgaagcgtgggagggctgcaacgagctggtcaagctgaatctgcagaacccggcggtgaaaaactacctgtttgacgttgtgcgcggctgggtgcgggactacgacatcgacggcctgcgtttggatgttgcctactgcctcgacctcggctttctggccgagctgcgcgggctggccgacagcatcaagccggagttcgcactggtgggtgagacgctgcacggcgactacaaccgctggatgaacgaccacgcctgccacagcgtaacgaactacgagtgctacaagggcctgtattcgagcttcaacacgggcaacatgcacgagatcagctacagcctgaaccgccagttcggctccgagcagtggtgcctgtacacgggcaagcacctgctgagctttgtggataaccacgatgtaacgcgcattgcgacgattttgacggacaagggctgcctacgccccatctacggtctgctgttcggtatgcccggtgtgccgtcggtctactacggcagtgaatggggcatggagggcgacaagcgcaacggcgacccgacgctgcgcccggcggtggagaagcccgaggagaacgacctgaccgcctggatcgcggcgctggcccacgcccacacgggcagcaaggcgctgtgccggggcagctaccgcaatgtgctggtccagcctaagcagctgatttttgagcgctacgccgacggtgagcgggtgctggtggccatcaacgccgacggcaatccgtttgacgcccactttgacgcgggctgcggccgcgcggttgacctcatcacaggcgccggccacgactttggcggcggcagcacgctggagccgtacagctgccacttctggaaatgtgagcgataatacgatataaaaaggcacctgtccgtgtgggcaggtgcctttttgtgctatgctgtatgttgtagggggcggcgtcctcgacgccccgcagggcagtatgtagggcggcctgccctcaggccgccgcagcggggtgagggtgccccgccctacaatgtatgggttaaaggggcagcccctgtaaaccctacggggcggcccatgtatgggttaaggttttaaagtttctttgcctactttcttttcaaagaaagtaggtcacaggttcgtatatcccatcagcttttcatccacgacggcggcggtgtcgcggccctcgcgcagcgcccagacgacaaggctctggccgcggcgcatatcgccgcaggcgaacaccttcgggtcggcagtggcgtacttcacatcggccacggtgccgcgcttcgtgcgctcgacgccgaacgcatcggccacatagggctcgcagcccgtaaagcctgccgcgatcagcaccaggtcgcagtccacggtgaactcctcgccggtgggcaccatctggcggcgtccgtccacgacctcgcttttcagcttggagatcagcgcgccgcagacctgcccggcctcgttcttgtagaactccttgaccgtcgtctggtagacgcgggggtcaaagccgaatttggcgatggcctcctgctggccgtagtcggttttcagcacgcggggccactcgggccagtcgttgccgggggcacgggttgcgggcgggcagggcatcatttccagctgcatgacgctctcgcagccctggcggatggccgtgccgacgcagtcgttgccggtgtcgccgccgccgatgaccagcacgcgcttgcccgcggcggaaaccgcctttccgtccgcaaagttggaatccagcagactgcgggtcacgctggtcaggtaatccaccgcaaagaagatgccctgcgcgtcgcggcccggggcctggatgtcgcgggcctgcttcgcgccgcagcacagcaccacggcgtcatagcgggccttcagctcctcggcgctgaccgtattgccgacgtcggcgttaaaaacaaactcaatgccctcgtcctgcaaaattttcacgcggcggtcaatgacccacttttccagcttcatgttggggatgccgtacatcagcaggccgcctgcgcggtcctcgcgctcatagatggtcacgcgatggccgcgcttgttgagcaggtcggccacggacaggcccgcgggacctgcgccgatgaccgccacggtcttgcccgtgcgggccgggggcggcacggcatgaatggcgccgctctcgtaaccgtattccacgatggcacgctcgttttccttgaccgtgaccgggtcacccgtgacgttgccgcaggtgcaggccgcctcgcacagggcggggcagacccggctcgtgaactccgggtatcggttcgtggcgatcagccggtgcacggccagatcccacttgccctgatagaccaggtcgttccactcggggatcaggttgttcagcgggcagccgctgaacatgccgcccagctgaacgccgctctggcagaaggggacgccgcagtccatgcagcgtgcgccctgggcctgctgctcgtcggtgtgcagagggacgtgaaactcgttaaaattccggatgcgctcctcgggcggcagctctaaactggtctgccgcgtaatttccataaatcctgtcggtttgcccatggtactctgcctcccttactttgtgcttttcatggcgtagaacgcctcaatctgggcctgctcgctgtcctcgcccttttcctccatctgggcgatcaggcgcagcattttgtcgtagtcgtgaggcaggaccttcttgaacttgggcagatactcgccgaagttgtcaaggatttccttgccgcgcggcgacccggtcagctccacatgctcacggatcaggtctttcaacagcgatacatcgtacttgtgctccacaggctccagactgaccatgtccttgttgacgcgctggtagaagtcccagtcctcgtccagcacgtaggcgatgccgccgctcatgccggctgcaaagttcttgccggtcttgccaagcacgaccaccgtgccgccggtcatgtactcgcagccatggtcgcccacgccctccacaacggcagttgcgccggagttgcgcacgcagaagcgctcaccggccacgccgttgatgaacgccgtgccgcccgtagcaccgtacagtgccacgttgccgatgacgatgttctcgctgcggtcaaaggcggcgtccttcggcggatagacgacgagcttgccgccggacagacccttgccgatgtagtcattcgcgtcgccgaccagctcgagcgtcaggcccttggggatgaacgcgccgaagctctggccgccgtagccgtggcagacgacatggaacgtgtcgtcgggcagcgtgttgccgaacctggcggtgatctcgctgccaatgatcgtgccgaacgcgcggtccgtgttgccgacgtccagcgtgacggtgctgggctttggctcggcggagtcgaagctctttttgaacttcttcatcaggatgcgcatgtcgggggtcttttccagctggaagttgtaaacatctttcgcgttgaagtgtacgttggagttctcgaccagcgggttctgcaaaagcgcggtcaggtccatctcgccggcgcgggagcctgcgggcgcggctttgaccttgagcaggtcggtgcggcccaccagctcatcgacggtgcgcacgccgagctttgccatgtactcgcgcaggtcctcggccatgaagcgcataaagttcatgatgtactcgggcttgcccttgaaccgcttgcgcagctcggggttctgggtgcagatgcccatggggcaggtgtcaaggttgcagacgcgcatcatgacgcagcccatggccaccagcgggccggtgccgaagccgaattcctcggcacccagcagggcggcaatggcaacgtcgcggccactcatcagcttgctgtccgcctcgatgcggacgcggctgcgcagaccgttcatgatcaggcactggtgtgcctcggcaatgcccagctcccacggcagacctgcgttgtggatggagttgcggggggctgcgcccgtgccgccgtcaaagccggaaatcaggatgacctccgcaccggccttggcaacgcccgcggcaatcgtgccgacaccggcctcgctgacgagcttgacgttgatggctgccttgcggttggagcacttcaaatcgtagatcagctgcgccaggtcctcaatcgagtaaatatcgtggtggggcgggggagagatcaggccgacgccggtggtcgagttgcgggtcttggcgacccacgggtagaccttgccgccgggcagctggccgccctcgccgggctttgcgccctgtgccatcttgatctggatctcactggcggagaccagatacttgcttgtcacgccgaagcgggcggatgccacctgcttgatggcggagttgcgctcggtgccgaagcggtcttcggcctcgccgccctcgccggtgttggacttgccgcccagacggttcatggcgatagccatgcactcgtgggcctcctcggacagcgcaccgtagctcatggccgcggtcttgaagcgcttgacgatggagtcaacgctctcgacctcgtcgaggggcacgccctgctcgggatagttgaagtccagcaggctgcgcaggtgcatcgggtcgccgttctcattggcagcggcggcggtgtactgcttgaaggtatcgtaattgccggtccagcaggcctgctgcaaaaggtggatggtctgcgggttgtagaggtgctgctcggcagcggggccgccgcggaatttgtgcgcacccaggctcggcagctcgcggttgatgtccagacccagcgggtcgaatgcttcctgatggcgggcttccagatcattctggatgtcctggatcgtgatgccgcccacgcgggagacggtgttcgtaaagtatttgtcgatgacctctttcgagatgcccagcgcctcaaagatctggctgcccgcgtaggactggatcgtggaaatgcccatcttggacgcgattttgacaatgcccgccagcacggccttgttgtagtcgctgacagcggcgtagtagtccttgtcgagaaggccgtcggaaatcagctcaccgatagtctcctgcgccagatacgggttgatggcagctgcgccgtagcccagcaacgtggcgaagtcgtgtaccaggcgcggctcgccgctttccagaatcagcgccatggcggtgcgcttgcgggtgcggaccagatacttgctgaccgcgcccacagccagcaggctgggaatggcgacgtggtactcgtcaatgtcgcggtccgacaaaatcaggatgttcgcgccgtcgcggtaggcgcggtccacatcgacaaacaggcgctcaatggccttttccaggtcggtgttcttgtagtagcagatggacagcgtcacgaccttgaagccgggcacgtccatggccttgatcttgagcagatcggtctcggtcaggatcgggttctcgattttcaggaccttgcagttgtcggcgtcctcctccagaagattgccctgcgcaccgacgtagacggtggtcgaggtgacgatcttctcgcgcagcgcgtcgatgggcgggtttgtgacctgcgcaaacatctgcttgaaatactcgctcagattcgggcgggtgtggctcaaaacggccagcggagtatcgctgcccatggccccggcgggctcgccgccgttcttggccatcggcagaatgatcgtggagacgtcctcataccggtagccgaacgccttctgcagctggacaagctgatccttcgtgtagctgggcaccttcttgttgggcaccttcaggctggacagcgggacgaggttgcggtccagccactcgccgtagggctggcggctggcgtagtcggccttcagcttttcgtcgtccaccagctcgcccctgacggtatccaccagcagcatcttgccggggcgcagacggtccttgcgcacgacctcgtcagcgggaatgtcgagcacgccgacctcgctggaaaggatcaggcggccatccttcgtgatgtagtagcggctcgggcgcagaccgttgcggtccagcactgcgcccatcacgtcgccgtcgctgaacaggatgctggcggggccgtcccacggctccagcatcgtggcatagtactggtagaagtcgcgcttcttcgggtccatcgacttgttgttgtcccacggctcgggaatcgtgaccatgacggccagcggcagatccatgccgttcatgaccatgaattccagcgtgttatccagctgggcagagtcggagccgccctggttgacgatgggcagaaccttcgtcatatcgtcctttaaatagttggaaccgatggtttcctcgcgggcaagcatcgtgtccacgttgccgcggatcgtgttgatctcgccgttgtgcaggatgaagcggttggggtgggcgcggttccagctcggggatgtgttcgtcgagaagcggctgtgtaccatgccgatggcggattcatagtcggcgtcctgcagatcgggatagaacaggcgcagctccttgacgaggaacatacctttatagacaatggtgcggctggacaggctgcaaacgtaggtgtcggggctggactgctcaaacacgcggcgcgccacatagaggcggcggtcaaaggcaatgccggcctcgacgcgctgcggcttgcccacaaagccctgccagatgctgggcatacaggcaatggccttgtggccgagcacctcggggcaggtgggaacctcgcgccagcctaagaagggcagaccctcctttttgcagacgatctcaaacagcttcttggcctggttgcgcttgagctcatccttctggaaaaagaacatgccaatgccatattcccgctctgcgcccagggtcagcccctgctcggcagcggccttctggaagaatttgtcgctgatctgcgtcagaatgccgacgccgtcgccggtcttgccctcggcgtccttgcccgcgcggtgctccagatgctccacgatctgcagcgcgtcgtcaatggttttgtggctcttgcgccccttgatgtccaccacagcgccgatgccgcagttgtcatgctcaaaccgggggctgtacagcccggcgggggtcttgcgctcggtaaagttttccat

SEQ ID NO: 114 - DNA, 7803 bp, unidentified
  source 1..7803: mol_type = unassigned DNA
tcagttaattcgatagctgacgaaggctatgcgtttgctgtccggtgcccatgagttgacattgatggtgccttgtccaccgaaaagctttaacaatgtcttgggttctccaccgtttgcgggcattaggcgcagctctacgttcttgtttgccaggtgctctcccggttccaggtcacctttgtagtaggtgatgaatacaacggattttccgtcaggggagatgtgggggaaccaggagttacgggtttcgtcaaaggtcatctgggtctgttcggagccgtctgccttcatgcgccagacttgcatgagtccggtgcgtacggaattgaaccagatgtattgtccgcagggggaatattccggtccgtcatccagaccttcggcagtggtcaggcgggtttcttcacctccttccgccgggatggtatagacgtcatagttgccgtttcgttcggcgcaataggcaagctctttgccgtcggggctccagccgtggaggtagctgggagccataggtgttattaaacggggagtgccgcccgtgatgggaagtgtataaatgcgcgatttatagtcttcttttgtcccgtggctgatggctatctgctgtccgtcggccgagaggacgtggtcgttgttgcagttttgggcaaatccggtgtttatcagttccggttcggcaggcgaggtgggggaaaggcggtaaagctttccgtcgttgttgtatagcagccattgcccgtcgggcgtccaattgggagcttcaatccggtagggaaattcttttacgacggtccggttaccgttagttacatccagtatttcgaggacgctggtaatctcgtttttttgttgagcggttgcggtcagtgcaacagttgcaaagaaggggattagatagggtttcatgttcatatcgtatttaataaatctccgcaagatacattttttattggaaactacatagtcggagcatgcttttttcagagagaatctgtagtgatggtcgaatgcgtagtgcttatcatatgaatagtctccgggattcttgaaatagttgtccacatactgccagttgtcggtgtcgagcggcgtgtgcgaagtcatgtacgatagggagcttttatctctactatctcgctgtccagactaatcaggtctttgcccaagcggacaatgcgggcatcttcgggcatgtagtcggtgccgacttccccctttccgcctccaccgaatgacaaccatcctgtaccttcgtcatctatcacggcacccgggtcgaaaggagccctgcagtggcctaatccttgggtgaactggctcaccagcatacgtcttaccgtccgattccacccgcgatacgatggatggcgcccatgaggctataccccatggcgagagggcctttacgtcaatcagtccgtgataagtccaatttaccatgtcatcggtggacagcatgaccagtgaatgggatgtattggtatgtgtttttgccgtattttcccacactgtccagttgctgggtgtcattggttccatacacatagagccttccgttgtattccaccgatgtcgggtcggccacaaaaatgaaatccaacagcgggttggcgtttccactgaagaattggggtgattctaccggacgcgtgtctttctttcttgaatcggaaagcgcccacacatcatttcctgcggatatagccgccagcagcaaagccgctgtaaataacttgattctttccatttttttatagtatgttatagaaacctatggtagccttttgattttggcttgtgttcttcaatcacctcaatcctttatttaagattgaaaaatcgggttattgaaaagttgccgcaaatattgggaattactatgtataatataaggtgtattatgtttttaataatgtgcctatatgtttcaagttatcattgtaatcagatggtgctgttttaaacttgctttacttgctttgggataattatgcggctatggattaaattgtttggaagggcattgtgttttatgcaaatatattggtagaagagcgtttttttattctaacgattcttgaaaagaaaaagcactgattattccagataatcagtgcttgaatatcgagccgctagccagacttgaactggcgacctacgcgttacgaatgcgttgctctaccaactgagctatagcggcaataagcttttgtttacggggtgcaaaggtacatctttatttgaaaaggcaaaaagaatctctgttttttttagaaatattttagtgggataattttctatttgaatgtcctgaactttattgccataaaaattggataataaaacgaaaagaagcatctttgtcgtaggtcctatagcaaataagtctgatactgattatgaatttaagaatctattataaatatctttcttcacgcatagcgtccaaatggacggtgttgttggtagatgtaattatcgttgtgatttccatgctttctgcatgttttttgcaatataggctttcgtccgtatcttatgaaatttctttgtatgtatggctgaccattttggctgtcttgtgtaatgtctgtttctttcatattctccgtacttatgtgggtgttatccgtttttcctcttttgtggatatttatcgtgtgttttggagtcttacgataagctatgctgtactgtttttagggaattactgttggtctgtttcggggcttggagaaactttgccgaacagcattctgtttatggcatatatgttcaccttctctctgatggcttgtatgcgcattgctgtgaagatgctttatgaagctattgcttttgatgcacgtcattgcgtgaatgtttttatttatggattccatgggactggagtcaatgttgcaaaatccttgagagttagtcgtaataatcattatcgcctgcgtggctttatttcggacgaacctgatatgataggtaaacatacgatgggatgcagggtatatcccaatgatgagcagctgtttgaccgtctaaagaaaaagaaagtggatacaatcattatctctccaagcaaggtgtcggatttggaaaattccggaatgctggataaactgttctctcatgatattcatgtaatgaccgttcctcccttaagcgattgtatggacgatggactgataaaggacattcaaatagaagattggctccgtagagaaccggtacaagttgacgtgcgtaaaattacggcccatatcgaggggcgtagagtaatggttacgggagcggcgggagctgtaggaagggaaatcgtccgccagttggctacactgaatccttatcagttgattctggtagatcaggcagaatccccattgtatgatgtacagttggaattgtctgatcattggaagaatctggaggtccgtgtattggttgcagatgttgctaaccgtacgcgtatggaggctatatttgaagaaacacgtcctcaacttgtttttcattctgctgcgtataagcatgtacaactgatggatgattttgtatcggaggcaattcaaacgaatatatcggggacagtgaatattgcggacctggcggcaaagtatagagtgtcccgtatggttatgatatctgctgctaatgcacgtcatccggagaatgctatggaatatagtaagcgtgtggcggaaatatatgtgcaatcatctgattgcaggttgaaacgcgacacaggggaaactgatatgttcatagtacgtttgggtgaggtgtatccgacgaatactcattgtttgattaccttgtctgaagcttgtatgctcaccctggaagtgggagtcatgggggatgggggagaagtgtacattgtgggagggcctggggatggacttttggattctgtaatcggtgaaaagataaagcgtgaaaaggcatctgttgatgattatgaacatatgcgggaagaagtgctggccttggtgcaacatagttatactgaaaaaaaggctattttgattggactaatgaaaaaaatagtgccaatttttccgctttcttctacccgatgaaaagacgtgaaagtgacagctttttaatgctttttctgaaacttagaggtggaataaatgtatattataaaaataatatattacctttgtgcccgatttatatttattacaagaactcaaaagattaatcagaatatcttatgcgtagattaataacactattctttttggtatttactttgtcaggggtagcttttgctcagcagatgtcagatgatcaggttgttcagtatgtaaaaagcgctcagcagatgggcaaaaatcaaaagcagattactactgaattaatgcggcggggagtgacaaaggaacaagttgaaagaattcagaaaaagtatgaaaactctaaatctggaagtccgcagagcaatacccaagatgagaagcgttctcgtcaacgtggtgaaatgagtggcgtagtcaaagggctgcgtacaacctcggaaacttattctgccagacaaacggatgttgcaggggattctttacaaatgatggataatcgttccttgtctcaaaagaaggaaacagaggatccgacttcgcaaatttatggtcataatatttttactaacgataatttgactttcgaacccaatgtgaatgttgctactcccgagaattatcgtctggggcctggtgacgaggtgattattgatgtgtggggagcttctgaaacaacgattcgacaaacaatctctccggaaggaagtattcttgtgaataatttaggaccggtttatctgagtggcaaaactgtaaaggaagccaataattatttgaaacaagaatttgccagaatatattctggagtaaccggaaatgttccgtctacccaagttaaactgacattaggagaaatacgttctattcaagtaaacgttatgggtgaagttgtggtgcccggaacttataccctctcatcatttgcttccgtatttcatgctttatatcgtgcaggtggtgtgaatccgattggtagtttgcgcagtattaaagtgattcgcaatggaaatacaatagcggatttggatgtttacgatttacttatgaaaggaaaaatgaaagatgacatccgtctgcaggatggtgatgtaattcttgtggatccttaccagtccctggtacagatattaggtaaggtaaaacgtccgatgttttatgaaatgaaatccactgaaaccgtaggtacattattgaagtattcaggtggttttacgggtgatgcttataagaaagcattacgtataatccgtaaaagtggacgtgagcatcaaatttataatgtggatgagatggattattccgtattccgcgtagatgacggtgataagataacggttgattccgttttacagcgttttgagaatcgtgtggaagtccgcggtgctgtatatcgtgaaggtttgtaccagttggacggtatgatgaatacagtgaagcagctgattaagaaagcggaaggacttcgcggagatgcattcttaaaccgtgctataatcgatcgtgagcttgaagacttgtcgcatgagattatacaagtagatgtgaaaggtttgctgaacgggacagctgcagatattcctttgcagaagaatgacattttatatattccaagtattcatgacttgaaggaagaagctacacttaccatccatggtgaagttgccaatccgggtacatatctctattctgataaaatgacagtagaggatttggtgttgcaggctggtggcttgttggaggcggcggctacaacaaaggttgaagttgcacggcgcatgaaagatccgaagagtacatctttcagtactacagtaggccagaatttctcttttgatttgaaagatggcttattggtgggagaaggaagccaggatttccatcttgagccttttgatgaaatttatgttcgtaagagtccgtcctattttaaacaacagaatgttatggtgggtggagaagtcctttttagcggtaattatgcactatcgaaaaagaatgaacgtttgagtgacttgatagctaaggctggtggagtaactcccgatgcttatataaaaggagcgcgtcttatacgtaggatgaccgaagaagaattccgccgtaaggaagatgctctgcgtatggcgcaagcgggaggcggagattccatatctgtaaaaagattggatttgtccgatacctattctgtaggtataaatctgggagaggccttgaaaaatcctggttcagatgctgatatggtgcttcgcgagggagatgtattatttgttccggagtacgtaagtacagtgaaaatcaacggtgctgtaatgtatccgaatacagttttatataaaaagggtgaaagcttgaaatattacatcaaccaggctggtggttttggtaatgacgccaagaaacgcaaggcctatgtaatatacatgaatggtacagtttctcgtttaagagcaggaaacaagaaagccattgaaccaggttgtgaaataattgttccaagtaaagaacagaaaaggaagatgactaccactgaaattctgggaatgggaagtacgacagcttctattgcagcgatgattgcgactatggttaatctctttaagtaatttgaattatgagcgaagaaaaaatacaaaacataacctctccacaacctgaggaacaagaaatagatttgatagaactggcccagaaagtatgggctagtcgcaaattggtttttaaggcgtgtggtatcgctgcccttgttggactggttgttgcatttagtattcctaaggagtattctacaagtgtgacgttggctccggagagtggtggtaaatctggtggcggaagtatgggagcccttgcagccatggcgggtatcaatttgggtacttcttctggtgaagatgctttgtcacccgaactttatcctgatattgtaagttctactccttttctgattgaactgttcgatgttaaagtcaaggatcagaaagcaaaagtagacacaactctgtatgcttatttgaaagaggaacagcgttctccttggtggagtgcaattttctccgctccttttaaggtgttaggatggacattgtctttgtttaaggatgaaccggaagagggggatgcaaagctggatccttttcgtcttactagagatgagtctgccattgcagatgctttaagtaaacgtatctctgtttccgtagacaaaaagacaggtgtgacaaccttgtctgttactatgcaggatcctttgatatctgcttcgctgacggataccgtgatgcattgcctgcagaactacatcacagattatcggactaataaggctcgtcatgatttggcatttaccgaaaaactttatggagaagcaaaggccagttatgagtctgcccagaagaaatacgcaaattttgtagatgcaaaccagaatataatattgctgagttatcgcgcagagcaagagcgtttacagaatgaaatgaatttagcctatcaagtatatacacaagtgtctcaacaattgcagatggcaagagctaaggtgcaggagattacaccggtatatacggttgtccagccggctacggtacctttgaagcctgcaaagcccaataaattgatgattttgatcggcttcatgttcttggcaggtgtcggcagtgtgggatggatattatttgtaaaagatttattaaagggatggaaaaagcaaacaatatga

SEQ ID NO: 115 - DNA, 9191 bp, unidentified
  source 1..9191: mol_type = unassigned DNA
atgtactgcacgagaaaggtaaatgacgattacacgtgggtaggcgccgacgggcggcggctggccatgtttgagggtgtgttcgatgtacccaacggcatctccttcaacagctatctgctgagggatgaaaagaccgtactgtttgacacggcggatgcggcggtgcgccgcaccttccgggaaaacctcctccatgcgctggaggggcggtcgctggactacgtggtggtacaccacatggagccggatcacacggcggagctggaggagctggtgctgcgcttcccggaggtgcagatctattgcagcgccatggccaagaccatgatgacccaattcttcggcaccggccttcaggagcgcatccatgtggtgaaggagggggataccctctgcaccgggcggcacacgctgcgctttatagcggcccccatggtccactggccggaggtgctgatgacctatgatgagacggatcgtctgctgctgacggcggatgccttcggctgcttcggggccttgaatggccggctgtttgccgatgaggtggacttcgaccgggattatctggacgaggcccggcgctactacaccaatatcgtgggcaaatacggctctcaggtacaggcggtgctgaagaaggcggcggagctggacatcgccatgctgctgcccctccacggctttgtgtggcggaaggagttggggtatctcctgcacaagtacgacctctggagccgctacgagccggaggagcggggggtgctcatcgcctatgcctccgtgtatggcaacacggagaacgccgccaacattctggcctgccgactgtcggagcggggtgtgaaggtgcagatgttcgatacctccgtgacgcctacctcttacattctgtcggcggccttccgttacagccatctggtgtttgctgccaccacctacaatgccggggtgttcatcaccatggaggagctgctccacgatatcgctgcccacaatctccagaatcgccgggtggtgctgctggagaacggctcctgggccccggccagcggcaaggagatgcagaagatcctccagcctctgaaggggtggcagcagatggaggacacctttaccatccgctccgccctgcgggaggatcagaccatgcagctggagcggctggcggccacgctggcggcggacgtacaggctgcggccccggcggaggagaagccggaggggcagcaccggtatgtgtgcaaggtctgcggctatgtatacgagggggactccctgccggaggattataagtgccccctgtgcggcgccggtgcggagtatttcaagcaggagtcgtaaagagcgcttttccccatgaaaaaaacagcaggatggcaataccatcctgctgttcttatatcattctacggaagaagcttccaccggagcagcctccgcaggttcctcctccggctccgtccacggctccatggtagccacgcagcggttgatgttcttccccagctcatagaacttggcctcgtagtccgtcatgactcccacggggccgttggcgtggaggttacgggtcacctccgacagggtaaagccatactgggggatctcctccacggaccactggaacagcttgtcgttgtcggttttgaagtgaatctgcccgcccataggcagcacctgccggtagcacttgagaaaattgccgtgggtcagacggcggcgcttctggttgctcttgggccacgggtcgcagaaattgatgtacagccggtccacctccgccggggcaaacatatccggcagcagggcggcgtcccccaccacgaagaatacgttgtgcagccccgccgcttgcgcccgttccatggccaccaccatggcgtccggcaccttctccacggcgatgagcagaacatccggctccgcttgggccgtacccacggtgaagcgccccttgccgcagcccagttctacccgcagctcacgggcatcgggcatcagctcccgccagtggccccgcatggcgaaggggtcctgtacctgacaggcccggcaggcctccatccggggcagtagattcttctttttccgcatacgcatggtgtcgttcctcctgaaaaacgccgcatggcgatggtatccgactacccaatataccggttttccggtgaaaaagcaagaggaaacgccggaaaatctctcccggcaagggagagccgccgaagcgacgttttcgtaggacggcgcatcgaagaacaggtgcggcaaaaagctggaaaagtaccaaaaaatccgacgaaatttgtgacttcctctaaaaagcaaaaagccgggtgagaagtgcttgataaattttagacgaacgtctataatggataaggtatatgagaaggcgcattttgcgggtgaaacacccctgtagaaagcgctttttcccatgacgctgccgctgcttcggcggcggctgccacagtaaggaggaaccattgtgacgaacgtactgttggagaaaaaaggtccatatgccgtggccaccatccaccgtccggaggcgctgaacgccctgaattctcaggtgctggcggatctggcggagctgctggacaccgtggaggccgacgaggagatccgtgtactggtcatcaccggcgccggggagaaggccttcgtggcgggggcagacatcggagagatgagcaccctcaccaaggccgagggcgaggccttcggcaagaaaggcaacgacgtattccgccggctggagacgctgcccatccccaccatcgccgctgtcaacggctttgcactgggcggcggctgcgagctgagcatgagctgcgacattcgcatctgcgccgacaccgccgtgttcggtcagccggaggccggtctgggtatcacccccggctttggcggcacccagcggctggcccgtctggttggccccggcatggccaagcagctgatctataccgccaagaacatcaaagccgacgaggccctgcggatcgggctggtgaacgccgtttatccggcgcaggagctgctgcccgcagcggagaagctggccgggaccatcgccaagaatgcccccatcgccgtgcgggcctgcaagaaggccatcaacgacggcctgcaggtggacatggatcgggccgtgaccatcgaggagaagctgttcggcagctgcttcgagacggcggaccagaaggagggcatgagcgcttttctggaaaagcgcaagcacgagccctaccagaaccggtaaagctctgtcagaacgttgttttccgggcataacgtccggtgggcaaaccaaggaccctatatattctaattaggaggaatcattatgaagatcgctgtttttggtgcaggtacgatgggtagcggtatcgctcaggtgttcgccggcaagggccacaccgttctgctgtatgcttccagcacggccagtgcgcagcgccacaaggataagctggctgcttctctgaataagcgtgtggccaagggcaagatggcgcaggaggccgctgacgatctgatgagccgtgtgctggtggaggagttcgaggccgccgctgacgccgatctggtcatcgagtgcgtggctgagaacatggctgtgaagaaggagctgctgggccgtctggacgttctgtgcaaggacgaggccatctttgcctccaatacctcctctctgtccatcaccgagatgggtcagggcctgaagcaccatctgatcggtatgcccttctttaaccccgtgcctgccatgaagctggtagaggtcattgccggcggcaatacccccgctgagctggtggactacatcaagaacctgtccaccgagatcggcaagacccccgtggtggtcaacgaggcccccggctttgtggtcaacaagatccttatcccctattgcaacgaaggcgtttgcgttctgcaggagggcgttgcctctgcggaagatatcgatattgccatgcagctgggctgtaaccaccccatgggtcccctgcatctgggtgacctcatcggctgggacgtggtgctgaacatcatggatgtgctgttcaatgagacccacgacagcaagtatcgtgcaaacgtattgattcggaagatggttcgcgccggcaagttgggcatcaagtctggcgagggcttctttaagtataccaagtaaaatttcgtaaaggagaaaagagtatggacttccatctgactaaggaacagctgctcgttcgcaagatgtaccgcgaatttgcagagaacgaagtgaagcccctggccgccgagatcgacgaggaagagcgtttccccatggagaccgtcgagaagatggcgaagctgggcatgatgggcatttacttccccaaggagtatggcggcgccggcggcgacgtcctctcctatgccatgtgcgtggaggagctggccaaggtctgcggcaccactgccgttatcgtttccgctcatacctctctgtgctgcgctcccattttcgagcacggcaccgaggctcagatgcaaaagtatctgcctgacctgctgtccggcaagaagatcggtgctttcggcctgaccgagcccggcgccggtaccgacgcgcagggccagcagaccactgctgtactggacgagtccggcgagaactacatcctcaacggctccaagtgcttcatcaccaacggcaacgtggctgataccttcgtcatcatcgccgtcaccggtaagaccaccgacaagcgtggccgtgccatgaaggagatttctgccttcgtggtggaaaagaccgaccccggcttcacgcagggtaagcacgagaagaagatgggtatccgtggcagctccacctgtgacctgattttcgaggactgcgtcatccccaaggaccgtatgctgggcaagaagggtcagggcttcaagatcgccatgcagactctggacggcggccgtatcggtatcgcctctcaggctctgggtctgggcgagggcgccgtggaggaggccgtcaagtacaccaaggagcgtgtccagttcggtaagcgtatctcccagttccagaacacccagttccagctggccgagatgcacacccggatgcaggctgctcagttcctggtctactccgctgccatgaagaagcagaaccacgagccctactccatggatgccgccatggccaagctgttcgctgccgatgccgcttccgacgtgacccgtcgtgccgtgcagctgttcggcggctacggctacacccgtgagtatcccgtggagcgcatgatgcgtgatgccaagatcaccgagatctatgagggcacttccgaggtccagcgcatggtcatcgccagccatctgggcgttaagtaattgaggaggtataaggcaaaatgaaagttattgttactgtgaagcaggttcccgatacctccggtaaggtggctgtgaaccccgatggcactctggaccgtgcgtccatgcagaccatcatcaaccccgatgatatgaacgccgtcgaggctgctctggccctgaaggacgagctgggctgcaaggtcgtggccttcaccatgggtccccctcccgccgagggtatgctgcgtgagctgatggccatgggcgtggacgagggtgtcctgatcaccgcccgtgagttcggcggctccgatacttacgccacctcccagatcatcgccgccggcatcgacacctacggtgtggatgaggacgacgtcattctggccggccgtcaggccatcgatggcgataccgctcaggtcggcccccagatcgctgagaagctgcatctgcctcaggtcacctatgccggtgagatcaagaaggagggcaacaccttcatcgtcaagcgtatgctggaggatggctacatgaccgtcaaggtcaacaccccctgcatgatcacctgcatcaaggagctgaatcagccccgttatctgtccgttggcggcgccttcgaggcttacagcaagcctctggtcaccatgacctacgagacgctgaaggatcaccccctgatcgatgccaccaccatcggtctgaagggctcccccaccaacattctcacctcctttacgcctcctcagaagggcgccggcatgatgcttgagggcgccggcaaggagaccaccgacaagctggctggcattctggccgccaagcatatcatctaaggaaggagataagaaaatggcttttaatagtgctgataccgctgccttcaaaaacgtctgggttttctgcgagcagcgtcagggcaagatgatgcccactacctttgaactgatctccgagggtcggaagctggctgacgaactgggcgttgagctgtgcggcattctgctgggcgacaacgtggacggcatcgccaaggagctgggcggctacggtgccgacaaggtctatgtctacaacagccccctgctgaaggactacaccactgatgcctacaccaaggtcatcaccgacgctgtggaggagatcaagcctgagatcctgctgttcggtgcctccaacatcggccgtgatctggctccccgctgcgcagctcgcctgcacaccggtctgtgcgccgactgcacccatctggacatcgatatgcccatctacaagaacttcctgcgtgaggcttccaccctacctgaggagcgtatcgagaagctgggtaccgtgaagatcaacggtcaggatcacgatgtctcccgtgacatcaagatgacccgtcccgctttcggcggccacctgatggcctccatcttctgcccccgcttccgccccgccatggccaccgtgcgccccggcgttatgaagaagcgtgagttctgcgccgactgcgccgagaaggttgagatcctgcatcccgctttcgagctgtctgccagcgacatcaagaccgaggtggtggagaccgtcaaggctgccaagaagctggtggacctgatcggtgccgacttcatcgtgtccgtgggccgtggcatcagcaaggatgtcgagggcggcatcaagctggctgaggagctggccgaggttctgggcggcgtcgtgggttcctcccgtgcctgcgtggacgccggctggatcaccgctgaccatcaggtcggccagaccggcaagaccgtccatcccaaggtctacgtcgccctgggtatctccggcgccatccagcacaaggctggtatgcaggactccgagtgcatcatcgccgtgaacaagaacgagaacgctcccatcttcgaggtggctgactacggtatcgttggtgacctgttcaaggtcgttcccgagctgatcgagtccatcaaggctgccaaggctgctcagtaatcgatcccctttacgaatcaagaagggctgtcccgctgtgggacagcccttctttcattgcttggatcatggtcaggtggtgatatgccagtaggtgacggtatcctcgatatccatttccgccagataaccacctactccgtcagagcagaataccgtgggccagttttgataggtggcaaagtcgttgatcacaaggggatcggtctgctgcgtatccggatagaggatatgggcagcaaaggtatcgtctacatacatacagctgctgccgcttccggtcagacgccacaggggcactgcggaatcagcggtggatacctttccgtcgctgatgcggatcgtctcataggaaaatttttgagtctccgggtcacccaaaccgcacaccatgtactcgcccgttatggcaaaggttgtgacctgctgcgaaagctccttctggtacagaataccggacgcattgcagaggaacgccgtccagtaggcgtcgtttttggcagaggccaaaaaggcgaattgcgtaccattggtgcaaacggttacatcggacatggtgtagtcggtgaggttcagcacgctggaaacggcactgccgtccacacgatatacggatatgccggtatcctctgattgcagatacatgggctgaccgttcaggcagaacaacgcagggacctgatcataggaaacggcttgaccggaggcgagagtgcttttccctgtgtctgtggagcggatcagagaccatttgaggccggaatccacggcttcatagtccacgtacagagcatcggctccgtccagaacggcggagatgatataggccggggaggaaacgggaaactgcttggtggtcccgtccgaatagttccagtagagcagataatcggtattataaagggggccggtctgagccgtgttgcgatgcccgacagccaacaggacgctgttttccccgcagcactgtataagggtggcggcctcatcctcggaaagctccaatggcgaggtgagccgctgcaccgtgggggcgggaatctgttccggcgccttggagcaggcggagaggggaatggcgcatatcaggaagaaaagaatgataattttcttcacgtgggggcctcctttcgttagtgggcaatatagagaccggcatttgcgttgatggcagaattcatttcagtgtaagtgcaagtatatcggccatagtatttggaaacattattgggatcattaaaggtgagaatggtttcccgcccgccagtggagccgccctgtgcccaagaatagccgatcactacaacataatgaccgcttgcatgcccatcatagtgcggcagcttctttgtttgtgtatggcatacgatcgggtagccggcatcaatacttggaactatctttgtaccgaaggatagctccgatgtgtaaatatatgcgtatttcccgcttccgagataggaattaagaccatttgcaatttgatagacataagttccatctgaggaatttgtattcattatgctacccaacttgctttgtgtggcagtatacccaaagtactttagtaccatctgcacgctggccggtccgcagtagtagttgttttcctgcttatacagcggtacacttagagtctctgagccgctgctgcagggagcataggtattgttgatagcgtcattcgtttcagcaatgatacgctgaatttgctgcaaacgttctgggtcatttcggtctggggtatgtttgtcataaaggtcatccgcaaaggcaggagaagcgataagagagagcgccaagaggaaaaagacgaaacgataagcaattttcttcat

SEQ ID NO: 116 - DNA, 13919 bp, unidentified
  source 1..13919: mol_type = unassigned DNA
atggatacaaagtatatattcgtaacaggcggagttgtttcaggacttggtaagggcattacagccgcatcattgggaagattgttaaaggcaagaggatataaggttacaatgcagaagtttgacccttatatcaatatggacccgggtacaatgagtccgtatcagcacggtgaagttttcgttacagatgatggtgcggaaacagaccttgaccttggacactatgaaagatttatcgacgaaaacctaagcgtaaattcaaacgtaacaacaggtaaaatttattggtcggttatttcaaaggaaagacgcggtgactatgagggaagaaccgtacaggtaattccgcatatcacaaacgaaatcaagtcaagagtttaccgtgttgcaaatacgcaggacacagatattgttattacggaaatcggcggaacagtcggtgatattgaatctacaccgttccttgaatcaatcagacaggttgtaaaggaagtcggtaaggaaaattgtatgtatatccaccttacacttgtaccgtatctttcaacatctggcgagcaaaagacaaagccgacacagcacagtgttaaggaacttctaagccttggtattcagcctgacgtacttgttttaagaactgaaaagcctcttgaagaaggacttgcagaaaagattgcgctattctgtaacgtatcacctgaatgtgttatcgaaaaccttgaccttgatacgctttacgaagtccctcttgcacttgaagaagaaggacttgcaaaggttgtatgtaaccgtcttggacttgaggacagaaagccacagcttgacgattggacaaagatggttgacgtcgttaaagaccttatgaacggcggcaaggaagaagttacaatttcacttgtaggtaaatatgtatcattgcacgatgcatatatcagtatcgttgaatcgctaaagcacggcggaatacagaattactcaaacgttaatatcaagtggataaacagtgaagaagttactgcaaagactgtggataaacttcttaaagattctgacggtattcttgtaccgggcggttttggtgacagaggtattgagggtaagattattgccgctcaatatgcaagagaacacaaaattccgtatcttggaatttgtcttggtatgcagattgcggttatagaatacgcaagaaacgtacttggctacaaggacgcaaattcatcggaacttaaccctgacacaactcaccctgtaatcgatcttatgcctgaacaacgtgacgttgaagatttgggcggtacaatgcgtctgggattgtatccatgtaaggttacaccgaacacacttgcacaaaaggtttataacagtgatcttatttatgaaagacatcgtcacagatatgaatttaataacttctacagaaatgaaataacagacaagggaatggttatttcaggtcagtcacctgacgataaacttgttgaaatggtagaaattcctgatcacccatggtatatcggtgttcagttccaccctgaattcaagtcaagacctaaccgtccgcacccattgtttgcctcatttatcaaggcggcattggacaagaagaataaggcggctgaataattggattgcctgcttgacagaaaggtaagattaacttgaaatattattggaagtatataaaaccgtatatgttgtttttcatattaggtcctttgcttatgcttacggaagttgcgggggaaatcgtgttgcctaaaattatggcgtcaatgattgacagcggtatcggtgcggaagtcgcaggacttggaacgggatatattttgtcgcgggcgttgtttatgattgcgtgtatcggtattatgataatcggcggtatcggcggtcatttctttgcgattagggcgtcggtttatttcagtgcggatttaagacagggagtatttgaaaaggtacagaacttctcatttaagaatatagacaacttttcgacaggctcacttgttacgcgtctgacgaacgacattacgcaagtgcagaatatggttagaatgcttctgattatggcaatgcgttcgccgggtatgctgataggcggtattataatggcttgttcaattaataaagaacttgcgcttatattggcattcgttattccgatactggcggtattgataggattgctgttaaaaaccgcgtttccgcgatttggtgcaatgcagaaaaaacttgataatcttaattcgggtatacaagagaatataacgaatgttcgagttataaaatcttttgtacgacaggattttgaaacagaaaaatttgaaaatgccaactcagaccttatgaatactacaatgagagccttgaaaatcgttataacgacaatgccgattatgatgttggcaatgaatataacaacattgcttgtggtatggttcggcggtaattttgttgtaggcggaagtatgggcgttggcgaccttactgcgtttacaacatatattacgcaaattcttatgtcacttatgatggtttcaatgcttttcttacagctttcgcgtgcgcttgcgtcatcgacaagaattacggaagtgcttaaaacagatgtagaccttacagatgaaaatgcgggtcaaaaggataagaaagttgaaaacggcagagttgaatttaaaaatgtttctttcaagtattacgaaaaacgtaaagaaaacgtacttgaaaatatttcgtttaccgcagagccgggagaaattgtcggtataatcggcacaacaggctcgggtaaatcgtcgcttgtacagcttataccgcgtctttatgacgttacagacggtgaagtgcttgttgacggtgtgaacgttaaggattacggtcttaaaaatttgcgtgacggcgtcggtatggtacttcagaaaaatgtattgttcagcggaagtatcgaagaaaatcttcgttggggtgacgaaaatgccacaatggaagaaattcgtgccgctgcggacgccgcacaggctgacggatttgtaaacgcatttacggacggctataatatggagctcggacagggcggtgtcaatgtttcaggcggacaaaagcagagattgtgtatcgcaagagcacttttgaaaaagccgaaaattcttatacttgacgacagtacaagtgccgttgacacagccacagaggctaaaatcagacaagcgtttacaacgagtttgaaacactcgactaaaataataatagcacagagaattacatccgtaatagatgcggataaaataattgtgcttgaggacggaaagattatcggtatgggaaatcacaatgagcttatgaagaattgtgaagaatatcgcgatatttactattctcaaacagataaagaaaaagaagtttcttaatatttgtacatcttatcagcccacgataagaaatgtattgactatgtgggcagaaaggctatggaagtaaaatgcctccaatgggaccaccgaacagaaacagaaatcagaaaaaacagaaacctaaaaatacaaaggcgactgcaaaaagactgttttcgtatttggaacaggaaaagcataaaattgcggcggcatttgtgtgtgttttggtaagttctgcgtcaacattgtgcggctcgtatcttttaagaccgattattaacggacttatagattcgaccaaaacatctcagcagaaaatcacttcgcttatggcaggacttgcacttatggcagtggtttatgtactcggtgtcggtgcaacatatttgcagggacgtattatgatcagcgtttcacagggtactctgaaacgtatcagaaagcatttgtttcgtaaggtgcagaaacttcctgtcagatattttgacacaaaccctacgggtgatataatgagccgttttactaatgacgttgatattatcggcgaaatgcttaattcgactcttgtacagattttctcgggtacgataactttaatcggtacacttgcacttatgctttacacaaactgggtgcttgcggttgtgacgatcgtggtatcaccgattattgcaaaaatcggaactgccatagccggtaaatcgcgaaaatattttatgaaacaacaaaccgacttgggtaaagtaaacggttatatcgaagaaaccgttacaggtcaaaaggttgttaaggtatttaattatgaagaaaatgtcgtaaatgaattttccgagcttaatcaaagtcttagaaattcacaggttaaggcacagtttataagcggaattatggggccttgtatgaacgcaatgagccaggtcaactacacattgacagcttgtgttggctcgataatcgctttcgcgtcacgttggggcggaggtgttccgttttccgcacttgacataggcggtcttactgttttcgtaaactattcaagacagttttcaagacctataaacgaacttgcacagcaggttacaaatattatgtcggcacttgccggtgcggaacgtgtatttaacgtaatggacgagacggaagaaatagatgacggtaaaaaacttgtacttgataaagtacacggtgacgtcttggttgagggtgtgacattcggatataatcccgataaaacaattttgaaagatgtttctgttttcgcccatccgggacagaaaatagcacttgtcggatcaacaggtgcgggtaaaacgacaataaccaacttgattacacgtttttataatattaataaaggaaaaatcactattgacggtgttgacattaaggatataagccttgaatgtttaagagaaaacatcgcgatggttttacaagatacacatttgtttacaggcacaattatggaaaatatccgttacggcagactttcggctaccgatgaagaagttcgacaggcggcgaaaacttcttgtgcggatatgttcataaaaaatatgcctgaaggctatgatacaatgctaaagggggacggttcaaacctttcacaaggtcagcgtcagcttttgaatattgcgcgagccgctttgtcaaaagcaccgatacttgtgcttgacgaggcgacaagctccgtcgatacaagaacggaaaaacatatcaatgagggtatggacgctcttatggaggacagaaccacgtttgttatagcacacagactgtctacaattcgtaatgcggacgcgattatggtacttgaaaacggtgagattatcgaaagaggtactcacgaagaattgcttgaaaagaaaggcagatattttgaattgtatacgggactcaaagaacttgattaatttatgctatatggcatagaaaggaatggtcagataaaatgaaggtatatcagttaatctatacctctgtacagcatagcctgtccgatcccgaacttggacttgtcaatcagtcggggctgagagtgttttcatgcacacagggacttacaaagcaaaatattgatgaaacaataagatttgctacttacagacttccgaaaaacaatgaaattaaatatacacagacaccttgcgatccgacagtgcctgaactgtttccgaaaattttcagaacgttcagactttcagatggaagatatgttgcaatgcagatttcttatgccggttatgattttgacggtcaaccgggcaatgtgtttgctcatgcatttatatttgatgatgttgacgaaaactttttgccggaaagatatatcggacataagcgttacagaacgcatcttaccgaaaaggatttaaacggtcagattgttcattatttgaaaccgcttgataatatcgcaccgtctgaaggtgtcgaaaataaggttatcaactttatcggcgaacataagtatgaattgacttatgttttagacagagcgacaagacttctgacttcagatgatattaaaaatatatgtatcgcggcaaatgacgcggaaacggtgcagatgtatttgcttgcattaaagtggattttaccaatcagtctttccgaaaacacaggtatttcaacgtataacgtgtacttaccgtcggataaacaaaaacagattgtgttccacggaactataaaacagcataataacataacaggtcaagccattgaggcgagaaaaaattgtatctatattgatatagaaaatacaaaatttccgcatagtgcaaagtcaatgctgttgggatttgacattgatgaacttcgtgaaatatacagaaagtatcatttcacgtcaatgacacagctgcttgactggcaggcaacttgggaaaatacaaccaaaacaggtataggcggaaaacttattaagctaaaaaaatcggcaggtgataatgctttcaaaacacgtgtgcttgaactttatccggctataaacgaccttaatatgaaaaacgtaaaatttgaactttcaaagattatgtttgacaatattgaattgttcccgaatgaaaaagaacgcgtgacggaaatttatatgggtcaatgtatcgaaaaactttgcaaaggcgagaatgttgattttgtaaatcctttgggcaatggcgaaaatgcaaaagaacaggcaaatgcgataagagcaaagctttcgatttatatgaattttgttcgtgaaaatatggacgatatttcagataagaataaaaccgaactgcttggactgttcggaagtataaagcatatggcagaggttgatacctggaaatcgttgtttacaaataaagaagatttaaaattattcgtgcttttggcatcgcagattgtcataacaggtacgggacttaacgcctttacgcaggtaaagggttgggaaaagtccgatttggcagaattggttgcatattttgaatcttcgacaaaagatccgttcttaaagaaaagctgtataaagtatatatacaacaataacttggattggtctaagtacggtatttcaaaaacacttcatgcgaaaacaaaaggcgaaagagaacaggatttgcagaaaatcagacgtatgctttcaaaggtcggatatataccgtatcagcgtgcgacatatacgagcttgaaacctgaagttacggacgatataagaaataataattcaccgcttttgatttcaagactgctttatgcggtttatcgttggcagggaacttacggcaatcagatgaaagccgaaaagtgtgcaaacagagtcagaaaactgcttttggaaatgagaaaaacgcagacttcgtgctttaattttatgattcctaaattggcacttgaaataatcgagtcaccgggacattatcacgaagttatgattaatacggaaacaatgcctccgagcttttggaattggttcttaatcggctataacaagagcaaggaagacgaggataaaatgcttgcgtatacgagagtgtacagtgcaagtaaagcgaaaatgtcgagaattccggcaaagaaaaaaatgcgtgaaacttttaaagacgtagttgaataggagagattatgatgaatataaaaaagaaaattatggtaatatttgcaaccggtattatggcattttcagcatcaccattcgtattggcggcaactccggcacctgcaaacaacactcaacaggcagaacaagttgacacaaccaagcaagatacggctaatcaaaataacacagccaatcaaaatacacaggcacaaattccggcagcaggaaatgtacaaactcaaacggacaattcaacacaagtttcaaataagaaatacttgtcaaagggatgggctgtattttggtttatattcactattataatcaatgcaattatcagcttttggattggaaacagattttataaactttcaaagaaagataatcacctttcatttgaaatcagagcattgagaaaagatattgaggaaaaattcgtaaacaacgtaggcggtttttcagaacaagaagttgatattaagaatctaaacgaaagtcttgcacttgatgatgaaggtttaaagccgactgcaaaacagcctgcacttaatgaagtcagtgcggaagaagaagcacgtttcagaagatgggaagaggcacagtctaaaccgagaaatgaaagagtaaagcctaagtcagtattaaaagaagaatttgacgaagaacttgatgacgttaagaaaataaagagaaagaattatcagcctaaacgtaatccgagcgaagattttgagggcgagaaagaaaacgaaaagtctgaaaaagtcgatatggacgctacaagggaaatcaagctaaagggcgagggtgtaaaatcaaaagccaaagaacttttgggtgatatattcccgtttaaagaggactaaaattaagtaggcaagccgtggcttgtttattgttaaaaagactgtcgtaggacagtcttttttgaaaagaaaggtactgttatggatttaaaagatgttcagccatatatagaggacaaagtctgtatggttaccggcggcggaggttcaatcggcagtgaaatagtgcgttcactgtcaaaactcaatgcagaaaaaatcgtaattgtcgatatatacgaaaacggtgcgtacagtgtaaaatgtgaagtcggcgacaaggtggcggttgaaattgcgtctgttcgcgattatgagaaaatggactgcattatgaataaatatcgtcccgatattgtatttcacgcggcggcacataagcacgttccttttatggagcttagtcccgaggaggctgttaaaaacaatgtaaagggtacagaaacggttgccgatttagccgaaaaatataatgcggacaattttgtgctaatttcgactgataaagcggttgagccgataagcgtgatgggtgcaagtaagcgttgttgtgaaatgtatgtgtatgaaaagtcgctgaaatcaaaacacactaagttttcgacggtgcgtttcggaaatgttttaaattccaacggttctgttattccgttgtttaaaaaacaaatcgaaaatggagttgtgacggtgacggataaggacgttacacgattttttatgacgataccgcaggcggttgagcttgttcttatgtcaattacgattgcgaatggcggcgaaatttttgtgtttgatatgggcggagcggtgagaatacttgacgttgcggaaaaagttataaaagacggtggaaaagtgccgtacaaagatgtaaaaattgagtttacaggtctgagaaaaggggataaacttcacgaaaaactgttttttgactttgaacaaccgcaaaaaacacgctatgaaaaaatattgcgtgtaaacggcagcagtatagaaaattttgcggaaatgcttgataagctgtacgaaaaagcctataaaaacgacagtgacggagttcgtgaaattataatgaaaatgacaaacagttaagggggaagagttatgaaaaaattgctttgtattataggtatcatatttgcgacaatgatgtcaacaacggcatttgccgaaatgttttcttttcagagcgttttgggagtgaatgatatatccgatattcaaagcgcggttatagtgggagataacggaaaatgtgcggatattgaacaggaagatttagaacagtggcttaatgtgtattggaattttcagggctatgagcctgtgattttaccgcagtcgaataacggctattattatattaagctatggaacaaggataaaacaaaatcttatgttgtgaatgcaaattcgggtatattagtaggaagatacggtgaaccgagcaaatctcacggagaggttaaggaaaattatttgtggtattttccgtatataggaaatgcaagaaatgcgttatatacggaaaattcaatattgcaaaccaaatatttatatgaaggatataacttgcgtgatgttacatctgatgatgtggcggttgtgcctgaagacaatatattttcatcagacggtgcgagcgattgggcgaaagaagaaatgcaaaaggcagcggcttgtaatttactgccgatagattttacaaatgaatatacaagaagtataacaagaaaagaattttgtgatttgatttatcgtcttaccgcaacggaatttaatccgattgccgactcaagaaaaggtcaacaggacgcaataaagcaggttatcgcagaaagacagcttgaagataaaatcagcgaagtttcatattccgattgtgattatgaaaaaattaaatttttgtcgggtgcagggataatttacggtatggacgacggaacttttgcacccgatgataatattacccgtgaacaggcggcggctattctttacagaacggctggatttttgggaaacaagacgattgtcgagccgaatggtacgacatttgatgatggaaaattaatttctgattgggcgagagagtctgtttcgattatgaattcaatgaagattatggaaggagtttctgatactgaatttgctccgaaaggcaactacaccgttgaacaggctattgcaacaatggtaagactttataattgttattaaaaacgatgttgcaaaaatgaaagaattgttgtaaaatacattaataactatgtaatttgggagagggtttaattggatatacatgaggcattgcaaaccgccggacagtatatttatataggttttcgtgcattgcttgaggggctgcaaaagctgttcggaatgttggcagattggtttcaaagtctgccatggccgaatgcgataaagcttttcagcaatgatacggctaataaatatttgtttttcggtattgcaatatacttgcttttgatgaatatatgggcattcgcactgttcggtgcggataaatcaaatgcaaagagaaaacagagaagaataaaagaaagtaaattgatgaaagtatgctttttcggcggtgcgacaggcggtattatcggtatgaatgtgttccgtcacaagacgctgaaaaagaaattttcggtcggtataccgattttgttcgtattacagcttattttaaacagtttcatactcggatttttgggattttggacgtttttctaaaaggactggaattttcaaagaaagtgtgatataataaaataagaatttgtcggaaaggaagatacggcagtggaattgaaagatattttatcgacagacgataaattgagaattatacaggaacttgtaccgggtaaacaaattacccttgcacacgttattgcaagtcctgaccctattttatatacgaaacttggacttaatcccgaaattgacttcggaagaagtgcaatcggaatacttacaatgagtcctgcggaaacggctattatagcggcagacttggctacaaaaacatcaaatgttgatttaagctttgttgaccgtttcagcggtacgcttataattacgggtatggttgcggacgttgaaacgtcacttcgtgcaattatggattatgccgaaagaactcttaaatttactgtttgcgagataacaaaaacatgaagaagataatacttatcggtagaagtgagtgcggtaaaaccacgcttacacaggcacttaaaggtgaaaaaatacattatcataagacgcagtatgtcaacagatttgatgttataatcgatacgcctggtgagtacatacaaaccaaaaacttgggaaatgcgattgcaatgtatacttttgaagcggacgttgtgggacttttgatgagttcaagagagccgtactcattgtatccgccatgcgtaacaccgctttgtaacagacctgttatcggaatagttacacagataaacagtgacggtgctgatcccgacagagcggaaagctggttaagacttgccggttgtgaaacgattttcagagttgattcaaaaacgggcgagggcgtttggaaaataattgattatttgcgtgaggacggcgatgtattgccgtgggacgaagaagaaaaaacaagcagatagacgaaaatgtctatctgttttttcttgcacaaaattttgcaatttgcatatgatatagcataatatcgaatgggaggcagaggatatgtgcggaatatgcggatttataaattttaagacaaaccttgtcaagaacgaacgagaaaatcttgctgttgctcaccgtatggcagaaaaactgcgtcacagaggtccggactcttggggagaatgggttggcgaacacgcagtgtttgctcatagccgtttggcggttatagacgttgaaaatggacttcagccgatgaaacgtacagtcgagggacacgaatttgtgattacatataacggtgaactttataacacgaacgacataagaaacgatttgaaatctcacggatacgaatttaccactgcatcggatactgaggtgctattgtatgcctacatacattacggcgaaaaatgtgccgaaatgctgaacggcatatatgcgtttgttatctgggattctatgcgacaaagaatttttgcttgtcgtgacagattcggcgtaaaaccgtttttctatacacagaaaaatgatgtgacggtgtttgcgtccgaactgaaatcactgtttgaatatccggacgtatcggcagtgcttgataaaacgggactttgtgaactgtttgcgctaagtcccgcaagaacacagggtgtcggtgtgttcaaagatgtaagagaacttcgaccggcaagatatatgataatcaaccgtcacggaatgacaataaagaaatattggtcgcttgtgagcggtgagcataaagacagttacgaggaaacgatagaaaaggtgcgttcgcttgtgtatgattcggtgaaaagacagcttatttcagatgtgcctattgcaacatttctgtcgggcggacttgattcgagtattataaccgcaatcggtgctatggaaatgaagaaaaaaggcgaaagaatttcaacgtattcgtttgattacgaggataataataagtatttcaaagcgtcgcattttcagccggacagtgatacgaaatgggtgccgagaatggtggaggcatttgatacaaaccatacatatcttgtttgcccgaataacgtgcttacggagcttttggaggaggcacttttggcgaaagatttaccgggtatggcagacgtagacgcgtcactgctgtatttctgtcgtgaggtgaagaaaaatcatacagttgtgctttccggcgaatgttcggacgaaatattcggcggttatccatggtttagggagaagaaagcgtttgaaacacacggtttcccatggtgctatgatttgtcgataagaaataatattttgcttgacagtgttcgtgaaactttggatatagacaattattcgcgtatgcgatatgaagaaagtattgcggaagtgccgatttttgacggcgataatgatgaggaaaaacgcagacgtgaaatttcgtatctgaatataaattggtttatgacgaatttgcttgacagaaaggacagaatgagtatggcaagcggactggaagtgcgtgtgccgttctgcgaccacagacttgtcgagtacgtttggaatataccttgggaaatgaaaaatcgtgacaatgtttctaaaaatgtattgcgtgaagcggcaaagggaatcttgcctgaagatgtacgtctaagacgtaaaagtccgtatccgaaaacgcataatccgcattatgaggaggcggttaagacgttgcttgacggtattatatccgatccgaacgcacctattttggcgctttgcgataaaacaaaattaacgtcacttttggacggcggttcgtcggattacggtaagccgtttttcggtcagcttatggcaggaccgcagtttataggatatattgtgcagatgaattatttgcttagagattataaagtgagaatactgtaa

SEQ ID NO: 117 - DNA, 7433 bp, unidentified
  source 1..7433: mol_type = unassigned DNA
ctaaccattcacgtactccaatgcaaacctcgtccctttctccaaatcccggttcacgttctttcccaatatatctttcagatattttgggtgcaggccgaagcccggacggatggagcgaacgttccactccgtaatcacttctccggccttcatatcctcggccacatagagagaacgtgatgcggaacggctacctctcattttctccgtcaattcgtaagtcattttccccaaagataactcagccatgcgcacatcttttaccatttgggcaaaatctttctcttccatagaaaaagaacaatccgggccaccaatggaacgattcaaaataaagtgcttttctatcatactcgcaccttgagtaactgccacaatgggagaaacactccccaaggtatggtcggaaagtccactttttacctggaaacgttctgccaaatcacgaatcatacaaagattggcttcctcaaccggagccggataagaagaggtacacttaagaaccgtaatatcattatttcccattctgcggcaagcttcaacagccaattgaatatcttcctcggtggctatgcctgtagcaagtaccatcggcttatgcttcgaagccgcgtattctatcaatggaatatccgtaatttcgaaagaagctatcttataaacgggacagtccaaagcctcaagcatatcgacggcagtcttatcaaaaggagaagaaaaacagatcagtccttcttctttggctacatgaaacaactcttcatgccactcccaaggagtataagcctgttcatacaaatcataaaaatattgcccgtcccatatagagccttcattaattataaaatcaggcttgtcacagcgaagcgtaatggtatcagcccgataggtctgcaacttgacggcatcggctccggcacgttttacagccctgacggtttcaatggctgtttctttcttaccgttatggttggcagacatctcagccacaatcatacacttatctctcatgtctttactatttaatcgtccttagaatactttcaagctcttccatactatcagtctgaagtatgatataccctaaacggtctaaagagttttttatttttttttcagaataaggtcttatttcagaccgaaaaacagccgatgaccgggaagagcttagaaaatccacacaacgctgatagttgagcggattaaggaactgtaccgctgagcatttttcatgtttgcgaaggacatcaacgggcaaaccaagagaacagttcaccagatttctcagcatatctatcccggttgacaatggaaccaaatcagaggttatataatctcctccaagccggcaagcaatttctatgatataagcgcccgattcattcagctttatttctgtatgcgaggggcaattattaagtccaatcaggcaaagtgcttttgatacggtctccgaaaccagctcccactcctgtttcgttatacgcgccggttcaatgtgcgtatcttcaacaaagaagccttctgcctcaccgatacaaagtttctccgtaatagtgacaacggtagttttattgttttgcgtatatgtttcaacactgaattcacggcctgttataaagccctcgacaatggcctttccggtacgggaataaccgagagcttcggaaaaagcaagtacaagttctttatgatttgtaaccttttttactccgcggcttgcagaggaatctaccggtttgacaatatatggataatcttgcaatgtgcccaagtccgtatctttatcacaaagcatgaaaaatggtacatcaatcccgttggccgcaaacatttccctctgcaagtatttgtttgtacagatttttgcgacctcagtggacatggacggaagccccagctgttccccgacataggaaaccacatttacaggcgcgtcacttgtagtaagtatgccgtcaacagagtgacgtttggcacattccaaaacaccttccttatccatcgtgctgacaagaaccggttccgaggcgtaccccattcccggagcattcgcatccatatctgcgactatggtatgcaatcccatatcgttcgcctttcggatgacaggaacctgcatttcacctgcgcccagtatcaataatcttttattcatataaccgaatttatcacatcacagatctttcttgcctgtgcttcactgaaccggaaatcattaaacaaattgacgatatgcttcgcctccacttccgcaacaggagaagaaacacctttgaacatgtatgaaaccgaagggaaattagtcccggcaaacagaccggccttgaatattgcgtcaagaaccttctgccggttctcgatgacaatcatgaacctccagttctggaaatcatctcccatctgaatcgattcaggaagcagattcctgtatatcttgtttattttctctttttccgcaatcacttttgggagctttctttcaatgatgtcaaaatattcctcatcggtcatttgcaaatttgaggcgtccagccaaggatagtcagccggaagcatatatctgacattctccaggagacatttccttatatataccgaatgcttttgttcactaatactatcatactgataatcaacaacttcgtaccccccctaaaacttgcatagccaccataggaaagttctatgaatttggcatatccggtactgtaaaggcagagatccacattttcaggcaaggaatctgccaattcgggaatgcacaagcaacaatcatcaatgatacaaagatttggatcgagacttttcactgcccggtaaaattctttgttgtcatactttttcccgtaggcatgcacaaatacaagaccggaatattttcccgcctctatagctgtcaaacatttctcggttgacatggcatggctttcatctatgtctataaactcaaaaccgacacctgctttcataaacgacaggggcactacaggacacacatttgccggcaataagaacggtttatcaaaatggttgccagacagataattatacaatatggccgaagctctttgtgaagttacttgcatatcaacagacttttaaacaaattgacaaaccgtttgggaatatccggagtgatggcatgtcttttacgaatggccatcttatccaaattctcagcaacaagagtaaaggcagcggcatcggtataatcacccgccccctgaatcagcccttcacgcaaaaacatataatagtcgtgctcctgattatcaacataataccctcctataacaggagttccacaggccaatgcctcattcatcatcgtagaggcaggcaatatggcgacatctacagtactaaacaagtctgcaatggaaccggcagacaaattcttctgataggttactttggggtcatcaaccatattctcggctgcatacgaatcaccgacaattgccgttatcttcttcacattgtctttggctttaattgcatgaatggtctgatacgtcaaattcaagaaatcagaaccaccaaaagccaccaatacatataaacctcctgaataattgttccgtttattctgcagcgcaacattgaagaaaggcctcctcaacaatgaaaattgaagcccaaaggcaaattgagtatatggttcacacgaatagtcatcacgcgtgtaacccaatccctgattgactataagatcagccacatagtgcttgtcgtgcatatcatccacacacaccagacagcaacctttttgcttgatggcacgctggtaatcagtagtaaagaaatagttgtcaagtaccacaatttcgtcaccttgcaaaagggaaaggaactcatcataatgcgattcttcttgtaaggggatgaaaggacataccttctccatctcactcacctgataaggggtaggatggcaagtaaagaaggtacaatcaaaatcgtccttcagcatatcggccaaagccagagtacggataaagtggccgtagccgatggtagcgcttgcgtcggcacggaaatagattttctgcattacatcatttatgaagcaactcatacttcatctctgccaatgcccagtcagtctgtgtatcaaggtcctgcacttcaagttcggaaagtaccaacccggctgtattctcaccccaaaaagtccggctctccacaaaggaagcagtacgagagaaatagaactgaccggcatcgtgataaatcggttctaaatcttgggaacgtgcatttttgtattcgggataaaccatactaatttttccatccacgatgtgaaggctgcgctgtataggataggaataagccacacaagtgaaaacggaatctatctccgaattcatttttccgtatgcttcccggagtctttcgggagtgacaaaaggagccgttgagtaaatgcaacaaaccgtttcaaactccctgccttgctctttatacttcctcagtacttcaagaattacatcatcagtaccagcatagtcatttgacatctcggcactccgcataaaaggaactttggcaccatacttacaagctattccggcaatctcctcatcatcggtagaaaccatcacctcctcaaaaagaccgctttgtaaagctgcctctatggaatatgcaatgataggtttacccataaagggcttgatattcttacgcggaatacgtttactgccgccacgtgcaggaatgattgctatatttttcatttctctacaaattctataaccttttcaatcacatactcctgttcctcgtccgtcaacgtgggatacatcggaagactcagacaatgttcgtaatactcttctactataggtaaatcgcctttcctatttccccactgctgatagtaaggcatcagatgaagcggagcataatgaacctgcgcatagacattgttctcgtgcagataattataaaggcccaagcggtcagctacttgaatgatataaaggtgataagcatgatagacatcggcagtattgaacggagtcttgatgccatctattccggaaaacgcttcattatagcgtcttacgatttcatggcggcgttcaagacctgctttcgcacgctccagctgagaaatacccaaggcagcctgaaaatcagtcagacggtaattgtagcctaactcctgcatctcgtaataccagccaccatgatgctcgtgcaataaagcagggtctttcgtaatgccatgcgtacggtaaagacaaagcttgtcatagagctccttgctgttggtggtcaccatgcctccctcacccgtagcgatatgtttcacgggatggaaagagaatacggcacagtcggcaaaacaaccgttaccacaatgttgtttcttgcctttactgtccatgaaatagccgccgggagcatggcaggcatcctctataatccacaagccgtactcgtcggcaagctttctgaactcttccagatccaaaggatagcctgcaaaatcaaccggaacaatacctttgtaagtaccgcggggagaagctttaagcatggcttcaagtttacggatatccatgaggtaagtatccttgtcaatatcacagaataccacctcgccgccacaatagcggatgcagttggcactggcagcaaaggtcatgggagtgacaatcaccttgtcacccggctttacattcagtgcggtagctgcaagatgaagccctgaagtggcattgttcaccgctacggcatattgtgcacctacatattcggcaaatttcgtttcaaattccctgattttgggaccttgtgtcaggtaatcgcttttcaaggtatcgatgactgcccggatatcctcatctgtgatatgctgacgaccgtatggaataggcttgcttatcatttcacctcgaaattagggtcaacgtatttctttatattctcgcgcatagtctctactgtctcccactccgtattgttgtcactgctgtagtggaaaccgtcgggaacgggtactgcattgtgatgtctgatgaactcttcgcgactgtgcttgaaagatacagaaggaagaatgacataatatctgcccaaatcgattgtatcaagagcatcggttacagtaatcatctcctcgtgcagcttctctcccggacggatgcccacttccacctgcggcagattgggtgcaatggcggtagccacgtcctggatatgataggaaggaatcttaggaataaagatttcaccacccaggtgatgtccgatggcatacatgaccaaagcgacaccggcttccagcgaaatgttgaaacgggtcatgcgcatatcggttatgggaagttccttcgccccgttgtcacgcttgttgataaagaaagggattacggaaccgcgggaacccatcacattgccataacggactacggagaacctgatgttcttggaaccgctgatattgttggcagcagtaaacagcttgtcggaagtgagcttggtggcgccataaagattgatgggggcacatgccttgtcggtagaaagggccaccacatgctgtacaccggtggcaagagcagcctttatcacattctgcgcaccgtgtacattggttttgatgcactcttcgggattgtattcagcggtatccacctgcttgatggcggctgcatggataatcacgtccactccttcgcaagcctgcgtcaggcgttcgaggtcacggacatcaccgataaagaaacgcagttgcggatacttatgaccgggatatttctgtttcagctcaaattgcttcagctcatcgcgggagtaaataatgattttctttacttgcggataatcacggagaatggtttccacaaacttctttccgaaggaacccgttcctccggtaatcaatacggatttattgttaagcattataatgaaaagttttattcatcgatatattcccacggatagggattgtctgtcacattctgaaactcatcaaccgcttcctgctgttcgggagtaagtgataaggaatcccaagaggcgatgatggaacggccctcgtcggccaaagactcgtcgaacacttcaccgtagcaggcggtaagcagacggagcttcagtaaggaagcgggaagggcatcgagcacatcccaacaacagtccagcactttctggacatgccgctgcttttcgccatggtccacaaaagaggcgctgtaacccataagaagggcaagacagacatttgcctgctcttcgatggtagtgccttttacacccgaccggtacaaagccatggtaagacggtagacctcaccgttccgccgtgacaagtcatcgctatagacgggactgccgtccatacccaaatacatcagttcgtgcgcagcacgctgaagagtgattgcttcttcggaaagagacat

SEQ ID NO: 118 - DNA, 7577 bp, unidentified
  source 1..7577: mol_type = unassigned DNA
atgcaaatggcagtaattgaactggaaaaaaacatttcatatatagagccgacgcaaaatccattgtcggcaaatgtcgtgctgattgaaggagaaaataatctgtggctgtacgatgtcggaaataatccgtgtgtgccacagattatatctgcttttaacacttcaaataagaagataaatgtgattttgtctcattttcatgcagaccatataggtaatcttgataaaatcagctattcaaatgtgtatcagggcagattgacttataaatatacgaaaacaggtgaaatactggaaaatgatttgtatttttgtgatggtaatatgaatcttcatatttttccactcccgtcaagtcatgccaaaggttctttggcattagaaataaatgaaaaatactgttttttgggggatggtgtttatgcaatgcaaaaaggtgaaaaaaggctttataatgcaggaattcttaaagaagaaattgaaattctaaaaaatataaaagcacaacattttatgcttagccacagaaatccttttgataattcaaaggattcggttataaggctgcttgatgggatatatgccaaaagaaaaagcggagagccgtatatttccggcattgacggggaatgagaggtattaagttagtcgtatcagaaagtatgcagagtatatttatgtaatctgcacactttacatttacacaaaataggtatactatataattaaaattccactatatacaggaggagaattatgaattattctattaatacaaaatgcgtacaggcaggttatacaccgggcaatggcgaaccaagacagattcctattatccagtcaacaacatttaagtatgatacaagcgaagatatgggaaagctttttgaccttgaggcatcaggatatttttatacaagattgcagaatccgaccaatgattatgtagcttcaaagattgcagcacttgagggtggtacagcggcaatgcttacttcatcaggtcaggcagccaatttttttgcgttgtttaatatatgcgaagcaggaagccatattgtttcttcatcatctatttatggtggaacatttaatcttattgaagtaactatgaaaaaaatgggcatagatgtgacatttgtagaccctgattgcacagatgaggaacttaatgctgcatttaaggataatacaagagctgtttttggagagtcaatagccaatccggcacttacagttcttgatatagagaaatttgcaaaagcagcacatgaacatggtgtaccgcttattgtagataatacattccctactccggttaatttaagacctatagaatggggagctgatattgttacacattctacaacaaaatatatggacggacatggtgcagctgtaggcggtgcgattgtagacagtggtaagtttgactggatggcacatgctgacaaatttccgggactttgtactcctgatgagtcatatcatggaattacatatgcagagaagtttggtaaagagggtgcgtttataactaagtgtacttcacagcttatgagggatttgggctgcattcagtcacctcagaatgcttttattttaaatctcggtctggagtcacttcatgtgcgtatgccaagacatgtggagaacggacaggctgttgcagaatttcttgagaagcaggataaggttgaatttgtcaattatccgggacttccatcgaataaatattatgaaatagcaaagaaatatatgccaaacggaggttgtggtgtagtttcctttgaattaaaaggtggaagagaagcagcagaaaagttcatgaagaatcttaaacttgcagcaattgagactcatgtagcagatgcgagaacatgctgcctcaatcctgcaacatcaacacacagacagatgaatgatgaacagcttgcagcggcgggaattccggctggacttatacgtatatcatgtggtcttgaagataagaatgatttgattgccgatatcaagcaggcacttgatgctatttaataaaaatttaataaacatcttcaaataagcttgaagagcatgttaattaagtaatatttcaaaaggagaagctcacgggcttctcctttttgaactcaggttattcattatattaaaatcttgcaagcatacggcttaggattttatcgcatataaatgtataagcagaactaaagatatttgcacttattcttaaaataacagcgtattgggcaccgaaaagccctgctgcaatagatagtgcaccaaatgtattaaaagctgtctgccatgcatatcctgctgaatatccaacgccgataccaccgattattcctatataagggtacattgatgaaggcaggatatagtaaaggacaaggaaaagaaggcatccgactatattaaaaagtcctcttttcacagctcttggctttatgtcatttgaaaatggaaggcagactgacatacatgcgatacctgcccacatggcacgagggaggttgagcagtgacattgcaagtattgaacttgatacaataaaagttagtttaatataccattttgtgcgtgatgaagtaatattaaattctgaaaataaatttttaaaagtacgatggtaaggtctgtttttctgatttttgtaaaaaacaatcatgcatataagcatgcctgctgacaaacctgcaattcgcataagataatcgtgtccgcttacatcatatcccagaagcaggagataactgagaacaaatgttgaatggttatacataatgacattatggcagctgaaaatcataatgagcattatacataagaaattaataaaaaatgccggtatggcaggcaccatatttgcaagacgaggaccggcagctaatattacaaatatacctgcaattgaaataagtccgtgatttgtctgaataccaaaatcagcctgtctgagtacaagtacagaaagcagaacgcatacaccaacgacgctgttactgtttcctgtcaacatactgaaaatagttacaattgcaacgcagaatatcattacaagataaaccttgaaattatatattaaaatatgtctgaatttttcttttttgtcatgtgtatttttgattaactgcttagaacctgcagaactaagctgtaattcctgataaaatgtcatagaaatctccttgtgatgatgtaaaaataatccccacaatagatagggttgaataatataacattaatgacggattatgtcaaataattttaattttacatgtaaaattttagatgcaaatttaaataataagtaccaatgcaaaaataaaagttatataataaaattatagggaagaaggggaatgacagctgcctgacaaaaaagggagagagtatcaggacagctatcggagtttatgaaaaggttttatctaatgtctttcgacattgtctatattacagataaaatgtgattaataattgttgattttatgaaaaaattgtgaaaaacatgaagtgtctcgaagaaaacaaaaaacaggatacagaaaggcggttaatatgaaagttggaattataggaatgggaaatatgggtgcaaaatatgccctgatgatagcaaaaggtgatgtcaaaggcatggaacttgctgcgataacaagagttactgatgaaagatgggatatgattagacaatatgtttcacctgaacttatgaagtttaattcgggtgacgatatgtatgccgccatagatgacaacagtttgtcagtggatgcagtaataatagtaacaccacattattcacatgaagaacttgttaagaaagcgtttgaacgtggaataagtgtactttgtgataaacctgcaggagtttattcaagacaggcaagaagtatgtgggaggcatatcagagtgcaaaaaaaagctgtccgaaacttcaatacggattcattttccatcagagaacatttcctgtttatagaaaaataaaagaaataatcgataataaaacgtatggtaatattaaaagggtaaactgggttattacagactggtacagacctgatgcatattatgaatctggtaaatggagagcaacgtggaaatatgacggaggaggaactctgcttaaccagtgtcctcataatcttgatttattgtcatggatatgtggaaatccttcagatgttgccggattttgcagcgaaggcaagtatcatccgatagaggtagaagatgatgtcacggcatatatggaatgggagaatggtgcaagcggagtgttcattgcatcaacaggcgaggcatccggtgtcaacaggctggagataagtcttgataatgctcttcttgtatgtgacaaaggccagcttcgtgtatgtgaacttgacaagccggaaatagaatacagaagaggaaatggtgatttatttgctaagccaaagtatgagtggaaagatataaagacagagccaaatgatggtgcatatgaaaaactactgacagaatatgcagcgggaaggtgtgttgcaaatggagacgaagctattaacagtctttatttatccaatgcgatatacctttcatcatggaaaaacagaaaagttgcattgcctgtaagtggcagcagatatgaacttatgtttgaaaaacagtttgaaaaagaacttgaaaaaaagattaataaagctataagacgtaagtgatagaatagcagaagccgcggttttatataactgcagcttctaaagatttttcgagatttttcaattcttttaattctcttattgtaaaatatccacatacaatggcggcggctgcatcggcgataggacctgcatacattacgccatcaattcccataaaaatagggaaaataattataagcggaagcaggaacaatatctgtcttgtaagtgacataaatacaccaagtcttgatttacctatagaattaaagaaatttgatgttacaggctgtattccgttgatgattgtcaaaaacatatatattctgaaatacctttcagaaaacttaaaatataattcacttccgttaccgaatatactgataatctggcgtggaaatacctgaaaacatacaaatgcaataagcgataaaccggaagctgcagcaagtgccagcagatatgttttacgtacacgtttatatttttttgctccgtaattaaagccgataacaggctgtgttccctgagatattccgattacaaatgacataaatatcatatttacttttgtgataattccggcacatgcgagaggaatatcaccgccatatacagacattgcaccataatgtgcaagtgtgttattcattacaatctgaacgactgtcattgcaatctggttgaaacatgcacttgctccgaggataaaaatatttttccaatgatgcaatgaaactgtaaagctgcttttgcttaattttatatttttaaaatgaaacatatagcgtaaacttatgcaaaatgaaattatctgtccaataatagttgcaagtgcggcacctgtcattcccatcttaaatacaaatatgaagacaggatcaagaattgtatttacaattgcaccgataagcattgatgtcattgaatagtttggactaccatccgcgagaatcagcttgctcattcctgtattggctatcagaaatggaaagcctatagcagtaatacgcgtatatgcctttgcatatggaagtacatcaggtgttgcaccgaaaaatttaagcattggcgtaaggaatatggtggttataagaaataaaaatattcccattatagccataagaattattccattgccggcatatttttctgattctttcttttcacctgcaccaagatgcagtgagtaattggttgcacaaccaattccgagcaggagtgatatagccgtgcatgttgttgatagtggaaatgcaatatttgttgctgcatttccaagcataccgataccctgaccgataaaaatctgatcgacgatgttgtataacgcagtaacaagcattgatataatacatggaattgcaaatcctacaagaagttttccctcgtttttgtacccgagtggattttcattttcattattgatgctcattgtgtgttatcctttctgataaaataatcaattattcttcaaatgaaacaatctgtgttgcattattataacccagctgctgcatttttttctggagattattaagagctttatcatattttaagaaagcatcatatgtatcgttaaaatatgagagagcttttttgtcgtccccatcttcttttgcctgccatgatagagtggcaaagtgatgaagaacttcatgtgttttgacaagctgaccaaattccggactttcagtaagacggctgtcagtctggctgttcagccattttccaagcttgcatcccaaagggttatcaacctgttttttctttaagtgttcaaatccgacaatattgttgtatacacgccatgtaagaacatagtgatctacttcaaatacacgcatccagtcctgctgtgtgatattagaacatccacgaaccaggtcacttctggtcttgtcaagataacgtcctaatttaaatacacgttgtcctgattgtatacattcatcagataaaatgttataactttgagaaatattttcaatttgttttgctaatgattttgttacaccggtctgcgtgtcaatgtcgttaaatatactgtcaacgcttacgcttatgttgtccatctggccattcatctgctgtatggcggcaagcgactgctcaactttcttatttccttctccaagtgtgagagttgtctcatccattgcagaggcaagtgagtcaatgctttctcttaattcagcaacatattttacaatatcttcggctgattgtgaagtgtttgaagataaaattcttacctgttcggcaacgacagaaaagccttttccggcttcacctgctcttgcagcttcaatagaagcatttaaagcaagaagattactctggcttgcgacattttggacaatgtcaacaatttcttctattttattgatttttcctttgaaatcctggacattctgattgatagtattgattttttcagatgatttattgacagctttaatactgtcattcatgtctgtagttatattttgtgaaactgatagaattttgtgagtgtttgtgcggatatctcccattgcatcagaaatgttttcaatagaactttcgagatgctggctggaattttccatgtgctgtattgattttgtctgtgattcgacctgttccagagtattctttataagagtgttgtcaccgataacacccattgtttcattgagacgcattacaacagggttatttacttctgtaaaaacatgcagcattttattgagtttttcaccatattcggggttgttaaagtcaacaggattaacaccgctgaagttacctgcaataattttatcaatagtatcaagtatctgtaccgcatcatggtcagacaaaatctcatccttttttttccttttaaacat

SEQ ID NO: 119 - DNA, 7450 bp, unidentified
  source 1..7450: mol_type = unassigned DNA
atgaaatcatttcaaaagcttccgccgcagtttcagtgtgccgaagtaaaagaatactatgacattctctgcaaaaaacagggaagttttgttttaaagcgaattcttgatatttttgcttctgttattcttcttgtgtttctcatcattccgattgcaattattgcgattttagttaaaaccgactcaaaaggtcctgtgttttacagacaggaaagggttacaacctacggaaagaagttcagaattcttaaattccgtacaatggtaacgggagccgacaggctcggaacacttgtcacaaccgacagcgactcccgagttacaaaaacaggaagagttttgcgaaaatatcgtcttgacgagctgccgcagattttcaatgttctttcgggcagtatgtcaatagtcggaacccgtccggaggttcagcattatgtagatatgtacgaacccgaatatcttgcaacactccttatgcctgccggaataacctcgttggcatcaattatgtataaggatgaagaaaagctgttgaaaggcgagatagatgttgacaaggtttatgttgaaaaaattcttcccgaaaaaatgaagttcaatctttcatatgtcaaaaatttcagctttggttccgatataaagctgatgttcaaaactgtaaaagaagttttcagctgatttcgttttgattggagtattcagatgaccgattttaaacaaaagctcagaggatttttttccgattcatcgctttttagaagaatctacattatagatttgttttttacaaacattgcgtttctccagattcctgcgtatgtacttcttgtttttctctttatatggggtgtatgcctttcggtatataatcaaagacataataatactttttttaaactgcgcttcggaatatggatcggagcatttcttgccgtaacggtatttacgatgctcatcaatttttcacagacatttctttacagccttcttatgcttctgcacgttgtaatgtgtttttttcttttttacggaatgcacacagagcctgaatttgattacagaatagagctttatcacattgcaaaattcataatgtacgcaaccacggtaatgaacataatcggtataacctgccttatgttcggctttaaatttgaatggtactggattaaatttaccgtttacgaaaacaggttcaccggttgttatgtcaacccgaatctcctcggcttcatatctgtggtgtcgattttctgttgccatatactttcaaaagggcattttatgcgcagaattgccgaaaaaattcctgaacccggcatcagtaagatatggattgtagcctgtcttgccacaaatgcgttttcgctcattctgtgcgattcaaacgcctcacttgtgcttgctctcggatatgcaattgtttatatagtttatatgttctttgccgacaaggcgggactttcaccttcaaaaattattttgaaaattacagcgctgtttcttgtgggagttttccttacaggctctgccttgatgttcagaacgatttgtcaggaaggcttttccgttgttgtatcaaagacaacctctgttgtcgatttgcttttaggcaaaaccgaaagcgaacttgtgcaggaaggactgactcccgaacagagagaacagcttgaaaaggataaaatcaccttttcacacgaaaacaaaaacattgacagtggaagaaagaagctttggcttgaatcaatcaatcttttcaaactgtcgccgattatcggaatttccaacggaaatattgttctctacagtgccgaatattcaaacggtgctttggaatattcgtatcacaaaagtgatttgcataacggctttcttacaattcttgtttcaactggtgtaatcggttttgttcttttcggaattttcggttttcgatttgcaaaacactccgcacagcacctgtttttgcagaaaaaaacatatcgtgatgatgtttatccctgtttgtttgcttttcttttcgcatatttgatttttgcctgctttgaaaaggcattgctttatgacatatcgtttatggtggtgtggttctggctgattatgggatatatgagttgctacatcacaaagtttgaaccgacgcttgaaagtcagtatctttttcacggaaaaagactcagacgggtaacaagaacaatgctctgatgcttgtataatcggaaaatttgatgtataataaccgtaggagcgttttgcttctgcggttattattttgtgaggtataattttatgaaatacggtttcatcaaggttgcatccgcaacaccgaaaatcagggttgcagactgtaaaaccaacacaataaatattattgaacagattaaagaggcacacaaaaacggtgcgtcactggttgtgtttcccgaactttgcgtaacgggctacacctgttccgatttattttatcagcgtgttttgcttaatgcggctgaaaaatcagtagagaaaattcttaaagaaacagcagaccttgacataatctcaattgttggtgttccggttgcaattgaatcggcactctacaattgtgccgcagtaatttataagggcgatatccttggtattgtacctaaggtcaacatccctaactacagcgaattttacgaggttcgtcattacacaagcggaaaaaatctttacgatgaaatttcatatgcaggcgtcgaaaccataatttcagacaatattgtgttctgttgtgacaaaatgcgtgatttcagctttggtgtagaagtttgcgaggatttgtgggttgccgcatctccgtctgttgaacacgcaaaacacggcgcaactataatctgcaacccgtcaacatcggatgatgtaataggcaaggcacagtatcgccgtgaccttgtaaaaatgcagagcggtaagctttgttgtgcatatatttacagcgattcgggctttggcgaaagcacaacggatatggtattttcgggacagaacataatctccgaaaacgcatctctgcttgcagaaagcaagcgctttacaacaggcattatctatgccgatattgatgttcggaagctttcggcagaacgcagaaagacaaatacttttacaaaaagtgatgacaataactttacctcggtatattttgatatgccgttaaaacataccgaacttactagagagttctctcagactccgttcattccgtcaaacaaatcagatcttgatgcccgttgtgaggagattataacaatgcaggcaacaggtcttgcaacaagacttgctcacacgggaattcaaaatgcggttttaggactttcaggaggtcttgacagtacgcttgctctcatcgtctgcgttcatgcttttgatatgctcggtattgacagaaagaatattcatactgtaacaatgccgtgtttcggcacaacaaagcgtacaaaatcaaacgcacagcttctggctgaggcttacggagtgtcttttgaagatatcaatattacaaaagctgttcgtcagcattttgcagatatcaaccacgatgaaagcgttacaaatataacctacgaaaactcacaggcgagagagagaacacagattctcatggatctttcaaacaaatataacggtcttgttatcggcacaggcgacctttctgagcttgctctcggttgggcaacctacaacggtgaccatatgagtatgtatgccgtaaatgtgtcaattccgaaaacccttgttcgctatcttactgcctatgaggcacagcacagcgaaggcgttctaaaaactgttcttcttgatgttcttgacacccctgtaagtcccgagcttcttccaccagataaaaacggcgaaattgcacagaaaaccgaagatgtggttggtccttatgaactccacgacttcttcttatattatttggtaagatttggctttgagccgaataaaatatactaccttgcaaagaaatcatttgcaggaaaatatgacaatgccacgatcaaaaagtggctcacaacttttgtcagaagattctttactcagcagttcaagcgttcatgtctgcctgacggaccgaaggttggttctgtaacactttcgcctcgttcagactggagaatgccgagtgatgcgtgtgtaaatctttggcttgaaaatcttgaagaagattaagaaataaaattttgacggtgattttatgaaattgtttattacacgagatgtatctccgtccgatgtttgttttctgattcgtgatgaattgggcagggataaatatactgctgttatgaaacgcagaaagagaagtatgcgtggtgttgtcaacaacattgtaagacttaatattcttgatgagaataaaaaccttgttgcaagacttcgacagttgcccgttgcaggagtaaattcatttactctaaaaacagacaaaacagcggcaaccctcgtggtgcttatgaccaataatatggttcaatgcaggttctacggcaataattggagaattctcggtgatgtaatttcaaaaaatttcagcattgttgatgttgacaacgcacagatatgcaatcacatcaagcaccctttaggatgcgaacttgaaattgccgatgcgcaaaacgaattgatatgtttgatgaccgccttatgcgtcaatatgataaatacagttgacaagcgagaggtacaggttgtataatctatgtgcagacagttcccaccgctaaagccatgtgaactgccacagagcaagcaaataacagtgcaaacagcgcagataaatattaaaaattgaaattgtcaaagcgacatcctttgatgtcgctttttgcaaattcagcttgcaacgcaaaattttgcgtttaatatattctcagggaggaataaatatggacaaattattaaagcttttaagtgaaaattccggttttacaacagcggaaatagcggcaatgctcggcgagcctgaggattacattaaggcgcagattaaggaatacgaaaattcgggggtaatcaagggctatcaggcagtcgtaaactgggatatggttgacgacagctatgttgaggctttaatcgaacttcaggtaactcccaaaaaggaaacaggctttgacgaaatggcagaactttgcatgggctttgaagaggttgaatctctctatcttatggcaggtacatatgactttgctctcattgtaagaggggagtcaatgcaggatatcgcaatgtttgttgccaaaaagctttctacaattgacggtgtgctttcaacgggtacacactttattatgcgtcgctacaaggacagaggagcgtgcctcttcagcgatgaagagaagcgtgacgggaggcatttaattctgtgatagattacaataattttattaataaaaagatttcaacggtaaaaccttcgggtatccgtaagttttttgatatagctaacgaaatggacgatgtcatttctctgagtatcggcgaaccagatttccagacaccgtggcacatccgtgaagaaggtattaacagtctgaaaaaaggtaagacttggtattccccgaacagaggctttgccgaacttcgtgaagaaattgcagcttactacaaaagaagattcggtattgagtatgatgccaaaaagcagacgcttgttactgtcggcggcagcgaagcaattgaccttgttttcaggacattgcttgatcctggtgatgaggttatcattcccgaaccttcatttgtttgttacgaaccgcttacggtgatggcagacggcgtgcctgttattatcaacacaaaaaacgaagataatttcagacttaaagcgtcagaccttcgtgccgcaattactccaaagacaaagcttcttgtacttccgttcccgaacaacccaactggtgcaattatggaaagggaagatcttgaagaaattgcagaggtaattaaggaacataacatttttatcctttcggacgaaatttattgtgagcttacatacggcaataagaaccatgtttcaattgctgaaatcgacggtatgtatgagcgcaccattgttgtaaacggcttttcaaaatcatatgctatgacaggctggaggcttggttatgcactcggtcctgttcctgttattgctcagatgacaaagctccaccagtacggaattatgtctgctcctacaaccgcacagtatgctgctattgaggctttgcgcaacggtgacagggatgtagagatgatgcgtggcgagtatgatatgaggagaagacttgttgtggacagctttaacgcaatgggactcacctgctttgaacctttgggtgcattctatgtgttcccgtgtatcaaaagcacaggccttacaagtgaggaattctgtacaagacttattgtggacaagcatgttgccgttgttccgggtactgcgttcggcgaatcaggcgaaggctttgtccgtgtgtcatattcatattctatcaagcatcttaaaattgcgcttgaaagaatcaaagagtttcttgatgaactgaaaaagggttaaaatatggaagtaaaagttcttgctcctgcaaaaataaatctttctctcgatgttctttcaaagagagcagacggttatcacaatatttcaactgttatgcaggccgttgatttgtatgatacaatcacaattacagacaatgaaagcggcacggtgacaatttcatgtaactgtgagggcgtgccgtgcgacgattcaaacatttgtgcaaaggcggcttacaagttctttgattattgcaaaacggatgttaagggcattcatatcgacattgacaagaaaattcccacacaggcaggtcttgccggcggaagcagtgacggtgcggctgttattttaggcttgaacaatatgttcggaacaatgctcaagccggcagagatgagagaaatcggtgaaaaagtcggtgcggatgtgcctttctgccttgagggcggaacaaagctttgcacgggaataggcactgcaattaaaaaagttgcctcctttcgttgcgacagcattgtaatctgcaaacccgacacagtcagcgtgtctactgccgatgcgtacaaaaaggttgacgcactcaatcctcacgcctgctataccgatgaaatggtaaaggcactgttcagcagagatatgtttatgatttcaacaacaatcttcaatgactttgaacttgctctgcaaattccggaagttaatgaaatcaagggtattatgctcaagtcaaaggcaaggggagcaggtatgagcggttcgggttcagccgtgttcggtgtgttcacttcgtcacgcagagccaagaagtgctatgacaagctttgtgaaagctacaaagaagtttttctctgcaagcccgtttcagacggttgcaaggtgctttga

SEQ ID NO: 120 - DNA, 8200 bp, unidentified
  source 1..8200: mol_type = unassigned DNA
acagatgccataccgaaagggaaagagtatgattacagccttccggcggtgcagagaaaacagttccgtcttgaaaaggagaagccgatactggatgcattctggaattggctggatcaacagcacccaaacaaaggaacccgtttggcgaaagcggtgaactatgcccaaaatcggaaaggcaccctgatgacctacctggaagacggacattgcagtctttcaaataatctcagtgaaaatgcaatcagaccattcacggttggccggaagaactggctgttcagtgccagtcctaaaggagccactgctagtgctattgtgtatacaatggttgagatggcaaaagcggactgtcaaaactaaaataaagtaaaacgcttgcatctatcattttggtgcaagcgtaattcatgagtaacgtagcaatatttttcacttacattagattaacgtgaaaataagaggataactttatggcaaaattacgagctgataaaagaaattataaaaaagcgtttacagttcatgcaaattcctatgataattggaatattggaagtccttacagtagacgtttattattatgttattgtgttgaatgtggattgaaatgcttgatcatggagaatgataatatatatacgatttctcaggcggatgatgagacagcgaaaattttggggtcacatgactttagaacgctgttaaagagagttggtcaggctggaacttatcgatttaagagttttcctacggagtatggaaatacggtaggaacagcggattatcatcagttgtgcaggtatttgattgctcctgcagagcagaatattacatatttgcaggaatttgatcatacgctggctgagattaaagaatggctgaaagaggtggtgtaaattatgaggttctatacatggaaagatattgaacgatatattttaatgcatcatgatgagtggaaagatgaattatacgatatagaagtttatccgaatgaaatggttgtatacccaaaatcagaacagggtacgctgcagaatgctgtattaaagaaactttttccgaaaaatattacacctgataatttaagtataaaattggatggtcagggagaagatttgatgattttatatgagtacgagtacagtccggttacggtaagaacgttgccattgtttaaaaaggcgatttatgaagattccatatatccgacggagcagttggcggatcttagctgtccggtttttgcatttcattcttataaggggggagttggacgaacactgtcgcttattgcatttgcacgggcatggaccaatcttcagaagaatccggaaaacagcaaacttttaattattgattctgatctggaggcaccgggacttaccttaatccagggtgatctaaatgatagtgcttttagttatttggatttattaactttgattcaggataacagcaatgtagaggaaattgtatcaacggcaggaaatttaatggggacgattaccttgccaatcgaaaccagccaacagagagtagaacatttctttcttccgacatatcgttatgaagagcaattgtttgatctgtatgcaagtccgcaaacaatcactgccagtcgaaataaagaatatattttggcagaagtactttcaaaactggcaagtagtttagggacaacagcagttctggtggatcttcgtgcggggatcagcgaatattcagcaccattgttgcttgatccgcgagtgaaaaaatattgtgtaacttctacttctcttcagtctgtaatgggaacaaagcaggtattaagttttattgcaaaaggtctgaagataaaggaagatacgcttctgcctactgtttttctgggtatgattccggaaacttttccaagaagagagaaacaggaaatcaaggaaaatttactcggatgttttgagactacagaggtaaaagaggaacttcttgataatatgatcgtggagcttccgtttgccagtgaattaatacatttaacagaatggaagcagattttaaatgttttaaaagacagagatatgtatgatgctgtcaaagaattagtaaaaccttactgtatatcagaagaaccagaaagaggaatttatacagaaaaacagcatcagatcattacaaaacaaatttgtgactttgcgaataatcagatcacggctgaagccaatggagcggaagaactattattaaccgaaccgattaaaaatctttgtgctcgtttcaatcaccagattccggtaacggttgttcagggagcaaagggatctggaaaaacattcttgtatcgtcagttgatagaaaagaaaaactggaattcttttttttctgaaattactcataaaaaaatcagtaaggaaaatggctattttatccctgttttagcaccgcagaatatttcacagattcaaacggttctgggacaatgtattgactgttttaatgaggcattgccttttgcagatgtttcacagagtatctacagtgacaattcttacagactggatcttaaagcgaataaagaaattgactggatgaatttttgggaacaattgtttgtaaattccgttaataaagagtttacctcatttgctcaactgaatgaaaaattaaaagaagaggaaaagacagttatctttttgattgatgggctggaagagatattaaaagcagtatcttcaaataaaaatcagcaaaaagcgatagaagttttatgccagggagttttgaatacgatcagtgcgagatatgaaaatattggtcttattatttttatacgaagcgatatggcacagaatgcaattacagttaattatgagcaattcaggcagtcatttgcctatgcagaactgaaatggtcttcggcagaagctttaaagttggcagtttggctggtaagccatgcaaacagtgatttttatcgggaaagtattccgattgaaaatgcgtcacaggaaataatcgataaatatctggaagaactctggggattgaaattaggaaagaaggattcaaatgaagcgtattcatcacgttggatactggcagctctttccgattttaatggacaacttcaggcacgtgacattatccggtttttgaaatatgcagcagggcagaatatgaaaaaaccgccgtatgatgatcggatattaatgcctgcagagatacgttatgcagtaccaaagtgttcaaatgccaaaatcagtgatattaaggcggaatatgaaaatttaaagcctatttttgaaaagctggaagatttgccgacagacgaaaaaacacttccaatgaatctggaaaataatatatttacatcggtagaagaaaagtccatgacacaatccggatatttgaaacgtgatggagaaaaactttatttaccggaaattatacgtcatgcactgggatttcgatatgaaaaaggtgcaagaccgagagtattgtctttgcttcttaaacattaaaaacatggaaggttaaaagaaagactccacaaatcaaagaaatagtggtatgatagatagactttagatttattggctatccgcatgcggtgaaatagtatcttccggattacatggggttgatttttgagaagatgtgtcaggattatctgctctattattcagataatcttctcgttgagctgagtgaaatcggtcagtggtgggggacagaccggaagaagaaaaatatcttttcaaaaggagattttacggatggacttcttcaggcacaggagcacggtgaagtccggctggtaacgctggaggatctctacagatagagggagatttttgaaaaatttttttgagttattatggaaaagagaaacataaggattgtctgaagtatttgatttttgataagagcaaatttcaaatcattttattcagaaaaagtggaggaatacattatgtgtggaattgttggttttacaggagaacatcaggcagcaccgattttattggatggtttgtcaaaactggagtaccggggatatgattcggcgggattggctgttcgagacggagagaatctggcacaggttgtgaaggcaaagggacgcttgagcaatctggcggagaaaacggacgatggtcataccttaaaaggtacttgcgggatcggtcatactcgctgggcaacgcatggggaaccgagtcagacaaatgcacatccgcatgtgtcgggaaactgcagcggttctggctcaggtatggtagaatccgaggttgttggtgtgcataatggcattattgagaattatacggagctaaaggaaaagttattaaaacatggctatactttttacagtcagacagatacagaagttgtgatcaagctggtggactactattataagaaatataatctgggtccgatcgatgcgatcgcgaaaacgatggtgcgtgtacgcggttcgtatgctctggaactgatgtttaaggattatccgggggagatctgggtggcacgaaaagacagtccgatgatcattggtattgcagacggcgaaacttatgttgcttctgatgttccggcaattctcaaatataccagaaatgtttattatattggaaatctggagttcgcaaaactgactccgggagaggcacatttttataatcttgatggcgatgagattgaaaaagaaacaaccgagatcaagtgggatgccgaagcagcagagaaagccggttttgagcattttatgatgaaggagatccatgagcagccaaaagcaatccaggatacgctcaattcggtcatcaaagaggataaaattgacctttcaacagtagaaatcacggacgaagagattcagaattttgatcagatctatattgttgcctgcggatcggcatggcatgtgggtatggcagcacagtatgtatttgaagatctggcggatattccggtgagggtagagctggcatccgaattccgttatcgaaaaatgccattaaaccagaaagcactggtgatcgtagttagccagtccggtgaaacagccgatacactggcggctcttagaatggcaaaagaaaagaatattaccacaatggcgatcgtcaatgtagttggaagcagcattgcacgcgaagccgataaggtattctatacacttgcaggtccggaaatctcagttgcgacaacgaaagcctacagtgcacagttagccgcaatgtactgcttggcagtgcagttcgcaaaagtcagaggaaagatttcagaagaacagtacagctattacatttccgagatgcttaccatcccggataaaatgcagaaagtcctggaagataaagaacggatccagtggtttgcttccaaatatgcaaacgcacatgatgtattcttcgtgggccgcggcattgattatgcagtctgcctggaaggaagcttaaaactcaaagaaatttcctatatccattccgaagcctatgcggcgggagaactgaagcatggaaccatcagcctgatcgaacagggcaccctggtgatcggagtcctgacacagagcgaactctatgagaaaaccatcagcaatatgctcgaatgtaagagccgcggagcttacctgatgggtctgacaacctatggaaaatacgaaatcgaagatcaggtgaactttaccgtttatgtaccaaaagtagatgagcattttgtcggaagcctggccgtggttccgctgcagctgatcggatactatgtcagcgtggcaaaaggactggatgtggataaaccgagaaatctggcgaagagcgtgacggtggagtgatatcaggtgcggtatgacctgcaaaaaaggcgcagcagcactgaaagatttcagagaacgtaaacaatactatatatcaaggaggtgcagcactgcatgagtaatgtattacctgttgaggatttaagtaaaacttacctggaacactctatggttatcaacaattttgttatcaaaatcggcagtcagattaaagacagtctgtgtcgtgtctttggtgatggtgtgcagtatgaatggcgtgcgaacgatgataaagtaatgattccggatgtatccattatctgcaacttgagagatcgaaagaatatttcttttacaggtattccacgttttgtgatggaggtcttatccaatgctacggaagaatacgacaggcacgaaaaaatgaatatttactgcaaagtcggagtttctgaatactggatcgttgattggagaaaaaagtccgtagaaatctatctttttgacttcgaagaggatggaacaggatatccgtatctttataaaacagttactgcacagaataaagaggagttacaactggtgatgttcccgaatttgaaaataacctttgaggaattgtttgatcttggagaatattgattttacatgactctccggtgcagtcagggaatgatttcagcttttcagtttgacttagtaaatgctatgagttatgatacttaaaagaagtaacttgtgagccagtcgctcatgagcataattagtggaggaaacagcatgaaattttttgtaacaggtgtcggcggacagcttggacatgatgtaatgaacgaactgatcaagagaggacatgagggtgtcggttctgatattcaggagcagtacagcggtgtggaagatggttctgaggtgacaaaagcaccttatctttcactggatatcacagataaagaagcagtaaagcgtgtcattgagagcgtaaaaccggatgcggtgatccactgcgcggcatggactgcggttgatatggcggaagatgatgacaagattgcaaaggtccgtgcgatcaatgcgggcggcacacagaacattgcggatgtctgcaagaagctggactgcaagatgacttacatcagcacagattatgtatttgacggtcagggcacagagccatggaagccggactgcaaggattataagccgatgaatgtctatgggcagacgaagctggaaggggaattggcagtaagccagacactggagaaatattttatcgtccgtattgcatgggtatttggcttaaatggcaagaattttatcaagacgatgctgaatgtcggcaagacgcatgacacggttcgtgtagtcaatgatcagatcggtacaccaacttacacttatgatctggcacgtctgctggttgatatgaatgaaacagaaaaatatggttattatcatgcgacgaacgagggcggatacatcagctggtatgattttacgagggaaatctaccgtcaggcaggttatacgaccagggttctgccggtaaccacagcagaatatggcttaagcaaagcggcaagaccgtttaacagccgtctggataagagcaagctggtggaaaatggatttaccccgcttccgacctggcaggacgcactgagccgttatctgaaagaaatcaaagtgtgatttcggatacattttaaatgataagtacaaaaaataagaagtgggagtcttctccgactaagataaaaagatactgaacagttgcagaaggagataaagaaaatgggacagatcaaagttgagaaaaatgtaggcggcatcgaaggcctttgtatcgtagaaccggccgttcatggtgacgaacgtggttatttcatggaaacctacaacgaaagagatatgaaagaggcaggcattgatattcatttcgtacaggataaccagtccatgtccacaaaaggagtattgagaggcctgcatttccagaaacagtatccgcagtgcaagctggtccgtgcggtacgcggaacggtatttgacgttgccgtggatctgcgttccgattccaggacttatggaaaatggttcggcgtggttttatctgcggaaaataaaaagcagttcctcattccagaaggatttgcacatggatttctggtgctgagcgatgaggcagaattctgctataaagtgaacgatttctggcatccgaacgatgagggcggcatggcatggaacgacccggagatcggcatcgagtggccggaagtgaagggcgagtacaaaggcagtgcatctgcagaaggttatacactggcagacggtacaccgctgaacctgagtgataaagaccagaaatggctgggattgaaagatacctttaaattttaa

SEQ ID NO: 121 - DNA, 6697 bp, unidentified
  source 1..6697: mol_type = unassigned DNA
atggaactgatttacacaaatgatttatgcaccggatgcaacaaatgcgtgcggggctgtcctgtacttacggcaaatattgcaacgcaggaaggttatgtaacggtagacccggacaaatgtattgcatgtggggaatgctttgatgtctgcccacatgaagcgagagactattatgatgatacggaccgcttctttgaagaccttgcatcgggaaagaaaatttccgtgatactggcaccggcatttctggcaaattatcccaaagaataccagcgtgtgctgggatatttaaagagtaagggagtcaaccatatctgcagtgtatcgttcggtgcggatatcacaacctggggatatctcaaatacattacggaacacaaatttttcgggggcatttcccagccgtgtccggcagtagtcacctatgtggaaaaatatataccggagctgattccgcgtctgatgccggtacacagtccgatgatgtgtactgctatttatatgaaaaaatacatgcaggtcacagatgaaatcgcttttatcagtccgtgtattgccaaaaaattagagattaccgatccaaattgcggcggatatgtttcttataatgtaacttttgaaaagatgatgaagtatatcggaaacgattatgaaggatgtgaaccatataccgatgaactggaatatggactggggtctttgtatccgatgcctggtggattgagggagaatgtagaacattttcttggaaaagagcaggtagtgcgtcaggtagaaggcgagcatgaggcatatgaatatctgcgttcctatgcaaaacgcattcagcagaataaagaacttccgtttatggtagatatcttaaattgcgcgaagggctgtctctacggaactgccacagatccgaaacggggaaccgatgatgtcatgctgacaatcgcaaaactgcggaacagcaaaaccagtgcaaaacaggagaaggcacactttggcaggaagagcaaaagcaggagtccgtgggcagatacactgacaccggaggaacgtctgaaaaacttcatggacgcttttggaaagctggacatcaacgattttatgcgcagctacaccaatcgcgcagtacatattgaggaaccgtccgaacaggagaagaaccgcctgtttgcagaaatgaaaaaagatacctatgaggaacagcacagggactgcgaatcctgtggatattcaagctgcaccaacatggtacgtgccatccacaatggagtcaacgtaaaagaaaactgtgtgcactatgtgcggggcatggcagaggaagagacaaaaaagattgcagaacttcgcgatcaggagcggacggaacaggaaatccgccagcagaagattacagatatcacagaccggtttattaccctgagtgataacattgcagaattgaatacggcaaatgaggagtctgcaaatgaagcaaccaatctggcacagtatattcaggatatttcccgcctgtgcgatgaactgaatgaatccatccgcattatgtcggatttcatcagtgtatataaaaagagcaatgaagatatttctgccattgcaggacagacaaatctgctttcgctcaatgcctccattgaggcggcgcgtgccggtgagaacggaagaggctttgcagtggtagcggaggaaatccgtacactgtctgattccacgaaggatcttctgacacagaacgaccagaaagccgaggcaattcttccaaagattacacagagcatggattcgatcaaagatctggtagaaagcatgaataccatgacgcagaaagtgtcaacgattgccgcaaacacggaagaaatttcttcccagacgacctatgtacagaatatgacagaagaaatgcgggatgaggtgaaagaactgtagatgaaaaaggatgcgtattacacatccggacaatttgcaaaaaaagcacatgtgacacttcgcgcgattcggtattatgataaacagaatattttaaaaccaagtgcacggactgccgcaggagcgcggctgtatacggatgcagatctggcaaaactccagcagatccttttattaaaatatctgggattttcgctggaagatatccgggagatgacacttgcctcggcagatcagcagtatcttcttgaatccatgcggatacagaagaagctgctgcggcagaaaatggacgaaatgcaggcgatggatgaggcaattgaccgcaccatagaagccatccagacggaacaggcgattgactggaacagtatgctggatctgatccatttgacggcagtagaacgaagcctgaaaaaccagtaccagaatgcggcaaatatttccgcccggattcgcctgcacagggagtattccgtcaatccgcaggggtggtttccgtggattatgcagcagtgtaatctgcagccggggatgcggattctggagctcggctgtggaaatggagcattatggactgaaaacagagaacagctgcctgcggatctatgggtcgttctctcggacaaatcagaaggaatgctaaaggatgcccggcgtgcactgggagaggacagccgtttttcctataaaaaatttgactgcgaaaaaattccttacgaggaggaaatgtttgatcttgtgatcgcggatcatgtgctgttttactgtgaagatatcccacaggtgcttgcagaatgtcggagggtcttaaaaaatgggggacggtttctatgcagtacctacggaaagcagcatatgcgggaaattaccgatctggtgcagcagttccataaagaaatcgttttgtcagcggaggtgctgtatgagcggttcgggcttgaaaacggagaaaacctgttagcaccgtatttttcggaaattcagatgcgaagatacgaggatgcgattgaaatagcggaagcagaaccgctgatttcctatattctttcctgtcacggaaatcagaaccagctgcttttgaaccagtacaaagagttccgggaatttgtttctgcccgcgtggcagatggattttatatcacaaaagatgccggaatcttcctgtgcagaaaataattagaaaaatctataaaaaagacttgaaggtgacctagcgtcaccttttataatggaaataaatatagaaatcgtaaatgcacacaggaggaaatgctcatgaccattattgtaacgggcggtgccggtttcatcggcagcaactttattttctatatgttaaaggaacatccgcaggatcgcattgtttgtctggattccctgacctatgcgggcaatctgtccacgcttgcaccggtgatggatcagccgaattttcgtttcgtaaaactcgatatctgcgaccgtccgggagtatataccctttttgaggaagaaaaaccggatgtgatcgtcaattttgcagcggagtcccatgtggaccgctccattgagaatccggaagtctttttgcagaccaatattatcggtacttccgtgctgatggacgcatgcaggaagtatggtatttcacggtatcatcaggtatccacggatgaggtatacggagatctgccactggaccgtccggatctgttcttccatgaggatacaccgatccacacctccagtccttacagcacttccaaggcatctgcggatctgcttgttatggcatatcacagaacgtacggcctgccggtgacgatcagccgctgttccaacaactacggcccataccagttcccggaaaaactcattccgcttatgattgcaaatgcgctggcagataagccgcttccggtatacggagagggactcaatgtgcgcgactggctgtatgtcggggatcactgtaaggcgattgacctgatcctgcgcaacggaaccgtcggagaagtctacaacattggtggacacaatgagatgaaaaatattgatatcgtaaaactcatctgtgaatatcttggcaagccggagagtctgatcgagcatgtgcaggacagaaaaggacacgatatgcgctatgccatcgatccgaccaagattcacaacgagctgggctggctgccggagacgatgtttaaagatggtatccgcctgaccatccagtggtatctggatcataaggaatggtgggagaatatcgtaaacggagagtatcaaaattactataaagaaatgtatgggaaaaaagggatataaagaaaggcatataaatatgaaagtattcgtgacaggcgttgccggacagctgggacatgatgtggtaaacgaactgacaaagcgcggacatcaggcagtcggttcggatattgcaccgacactggaatcctgtgcatcgtatgtgccgctggacatcaccgatgcggcagcagtggaacagacaatcatgcaagtacagccggatgccatcgtgcactgtgcggcatggaccgctgtggatgcagcagaggacgaagaaaatcaggcaaaagtcagagccatcaacgtagatggaacgaaacatattgcggacgcagcgaaaaaagcagatgccaaaatgatctatatcagtaccgactatgtgtttgacggacagggcgagactccgtgggagccggactgcaaagcatacgcaccgcttaacgtatacggacagacgaaacttggtggggaactggcagtggcacagacactggaaaagtatttcatcgttcgtatcgcttgggtatttggattaaatggaaagaattttatcaaaaccatgttgcaggtagcgaaaaatcacccacaggtgtgcgtggtaaatgaccagatcggcacaccaacctatacttacgatctggcaagactgcttgttgacatgatggaaaccgaaaaatatggttattatcatgcgacaaacgaaggtggctacatctcctggtatgattttacaaaagaaatttaccggcaggcaggactcgctaccgaagtgcagcctgtgacaaccgcggaatacggtctgtcaaaggcagcgcgtccgtttaacagcagactggaaaaaaagaaactgaaagaaaatggatttacaccgcttccaacctggcaggacgcactggggcggtatctgcaggaattaaagcgacagggggaactttaagatgaagggaattatattggcaggcggcgcagggacacggctgtatccgctgacgatggtaaccagtaaacaattgcttccggtatatgacaaaccgatgatttattatccgctgtctacactgatgctggcaggcatccgtgatattttagttatttccacgcaggaagataccccgagatttgaagcacttttgggggatggaaatcagttcgggcttcatctgtcctacaaagtgcagccgtccccggacggacttgcacaggcatttttgcttggagaggaatttatcggagaggatgcctgtgccatggtactcggcgacaacattttctacggaaacggattcggaaaaattctgcgcaatgccgcaaaggatgcacaagagggacaggcaaccgtctttggctattatgtcaacgatccggagcgtttcggtgtcgtggatttcgatgcgaacggaaaagccgtatccattgaagaaaaaccggcacagccaaagagcaactatgccgtgaccggactgtatttctatccggcaggcgtgagcaaaatggcaaaacaggtgcagccatccgcccgtggcgaactggagatcaccaccttaaatgacctgtatctgcagcagaaaaacttaaatgtgcagctgctcggacgtgggtttgcatggctggataccggaacgatggacagtctgttggatgcggcagcatttgtgcagatgatcgagcaccgtcagggtgtgaccatttccgcgccggaagaaatcgcatatatcaatcagtggatcacaaaggaaaaactgatggactcggccgcacgctacggaaagagtccgtatggagagcatttgaaagcagtcgcagagggcagagtgaaatattaaaatcagcgtaactattctgagggggttctgaatagatacaaattagcatgaaagaggaaaaaacagtgggacagataacagttgaaaaaaatgtcggcggtatcgaagggctgtgtgtgattacaccggccgtacacggggatgcccgcggatactttatggagacctacaatgaacgggaaatgaaagaagccggattcgatatccagtttgtacaggataaccagtccatgtccgtcaaaggcgtattgcgcggactgcatttccagatcaactatccgcagtgcaaactcgtgcgcgctgtgcgcggcagcgtgtttgatgtggcagtggatctgcgggaaggttccgcaacctatggaaaatggtacggagtggaactttccgaggaaaacaaaaagcagtttttgattccggaaggctttgcgcatggctttctggtcctgtccgatgaggcagagttctgttacaaagtcaatgacttctggcatccgaacgacgagggcggcctggcatggaatgacccaaagatcggtatccggtggccggatgtgacaggtgggtatcgcggaatcccgtcggcggaaggatattgtatggcagatgggacaccgctgacactttcggagaaagaccagaagtggcctggattagaggaaaaataa

SEQ ID NO: 122 - DNA, 13744 bp, unidentified
  source 1..13744: mol_type = unassigned DNA
tcaattctttatcggcaaccgttcccacagccaacgtggaatcattcgccagaagaataccaataggcgatagcgtccgtcaattactgtcactcgttttttgtgtttcaacgcccggactatatattccgccactttatcggcatgcatcagcatcggatacttgccgtttcgcagtaaatccgttgctacgaaccccggacggatgtcggtgaagcggatattaagatgctgcatccgtgcgagttgtgccaaagcatcgatgtatgtattctgaaaccgtttggtggcggagtaggcgggtgcgactcccaatcccttggtacctgctatggagctgattacagcgatatgtcctttttttgtctttttgaaataatcgaaagctgcggttaccattcggataaagccttcgacattggtacgtgcggtattcagttctatttcaggttccaggttcctgttctgataacctacgccggaactgaggaagaataaatccatgccgcctaagcggtctatcagttctgtaaggtgtaagacggcattttcctttgtcacatcaagatgctgtatctctatctgttggggattggcttgctgcatgcttcgcaggacttcttcccgtctgccggcaatgcctatgcgccagccttgttgcacgagtattccggctacttcctgtccgatgcctgaggtggctcctatgatgatagcttttttcatgggaagagattatccgataatggttgctacgatttttcttcctccgccacggttgcggaattcacaaagataaataccctgccagatgcccatattcatccgtccattggtgatggggatggtcagttctgctcctacaatggtagatttggcatgcgccggcatatcgtcgtcaccctcgcaggtatgttcgtagtaaggctcacgctccttgacaaggttgttgaagatagctttcatatctgtctgtacatccggatcggcgttctcgttgatggttagtgcggcacttgtgtgtttgataaacaagtgcaatagtccggtcggaggcaactgtggcaagttacgtactatttcttccgtaatcagatggaacccgcgtcgatggggggtaagggtaaattctttctgtataatcatattttctattctttattccattggccgtacttggcaaggaaacactactgtgaacgtgctacctttatttacggtggaggttacttcgattgttccgttcatatgttccatgatagacctgcagataggcaagcccaatccggctccctgaatgaaagcatcagctttttcgaaccgttcaaatattatgccgagcttttcctcagggattccgcgccctgtgtcggaaacgcttattcttgtttcggacggtgtcgtctcgtacgaaatttcgacatagccctgtacggtatttttcagtgcgttcgatatgaggttgctcaaaacctgcttgatgcgcatcggatcttgctttatcaggttaggagttgccgggtagcgtttcttgagcgttacgccttcaggtacgttgggctggcattcggtgcaactttcatctatcaggtcggagaggttgcaccagaccggggacaactctatgtgtccggcttctatcttcgataaatccagtacatcgttgatgatgttcagcagcaattcgttgttgtggtttatcagggagatgtaatggttgcgttcctcagcatcttctatatggggcaggaggctggaaaagccgataatagcattcagcggtgtacgtatttcgtgactcatgttggcaagaaaggccgatttcaggcggtctgactcttcggctttttctttggcatctatcagcatggcttccgtggctttgagccgggtaatgtcgtagttgatacagattagttcgatactgttccgttcgggagcgtaggttttcactatcaggttgacatgtgtccaagtgtagctgccgtcttctctgagaacacgtacttctttattgaacttgtcttccataccttttgctgcattgttcaggaaaccgagcatggcgcgccggtcttcgggatggatatgtctgtacactccgatgattcgggacagaggagttccttcttgttcgccgatattgatgtaccagctgtgttgggcatctccttgccgggtgagtaagtcgtagtgtgcgtatcctactttggcatagttacctatcagttcgaagaaactttcgaattcctgtatcttgttgtaggctacggtggtttcggtcttatcggcattaatcaacaggtagttggcgggggtgtggttctcgtcgtacagcgtggttactttagttacgaggtctattgtaccggtcctggtttgtggattgtagtaagaacctactttcgagaagtcgtagcggaatgtgaaatcggcgtcttcatattttttcagtttctctttcatctctttcgggaagatagggttatcaaatatattgatacccagcaagtcttcttttcgttgcagatgaaacatttccaattccttatcgttgaggtctgtcaatactccgtctgtattgtagacttcaatgcctaccggaagatgcttatagatgttgtgcaagagttgttcgcgttgtcgcaacatctgtgtggcggacgacatataaggaccgtcctgtatttcggctatgccgtaaatcttggtctttccgttttcatcggttttttgcatacagattttgctgcggacccatgtcggtcctttgacggtatcaagcagatagacggtttcattcgtctgttgtatgttgtcgaaggaacggacggtagtatgcggctgttcctctctcagtatgcgcttgttgaaattttcaaaactgatacaaccgccttcttccaatcctaacaggctggcgatgggaccgtagtatatataattggcatcttgtatatcggctttccaccagcctatattggcgttgtgcattatttctgacagcaggttgtaatccttttcagcgtccatacatggatgtttagggttgtttatattatatgcgcatacaaaaatagatataattcgcagaaatggaaagaaatagggagcggatgttttattaaaagcggtacaataatgattttgttgaacttatctttgtcttggcctgtgaaaccgtgatgccagttattgataagagagcgtgaatttgcatgctattttgaagaatgatacgggtaataatgggagtaattaccgtaacaacaaccggaaaaatatggctttttaatgattcgcttgtaatttattcggagataagcggtatctttgttaccgtttacaacgcatttacccaacaaaacaaaaaatatatggaaaaagttattatcaattcgtacgaggattttgaaaagctggtaggtcagcaaatcggtgtttcggagtatgtggaacttacgcaggaacgcatcaatctctttgccgacgcaacgctggaccatcagtggattcacattgacacagaacgcgccaagaccgaaagtccttttaagagtaccattgcacacggttatctcaccctctccatgttgcctcatctgtggaatcagattatcgaggtaaataacctgaagatgatgattaactacggaatggataagatgaagttcggtcaggctgtactttccggacagagcatccgtctggtggcttctctgcattcgttggcaaacctgcgcggtgtggcaaaggcggaaataaagtttgccattgagattcagggcgagaagaagaaagcgcttgaaggtattgctgtatttttatattatttcaactgattatgcgcaaaatggtgtgcccccaatgcaaggtgggggcattttatgtcttgaacgggcagggagagcgtttgcccgtatatgtgtcggacaaaggtgaggtcgtaccgaaagatccggcagcttctttggaagggtatgacctggaagaggtttactgcttatgctgttcctggcacgggactccgaaacgtctggtgaaatattgatatatacgctctttccataaatgcctgcacgctgcggccggatgatagagcagcatgcgcggtccggcatatcgcatgacttcctgcatccgcttcttcatctccggcttgtagcaatgtaccgggcatagtctgcaagttgttttattctctccgaacgggcagcgcgacaggcgcatgcgtgcgtactccagcaattcgagacattgcgggcagagttccttgttgccctctttcctgcggcaatagaggcggatcatctgttctacggtgcgttgttcttgggcaatgcgtgattggcaggtcttattcatccatattgcgtttcaggtaaaccatatctttcagttgtttgcccgcttcataaatgggatggtcgtagttatccgtaaagaagtccgggatgcggtgggaataggtaaatccgcagttctcgtaaaatggaatcgccaatgggctgtctccggttcctacgagcattgtccggcatctgcctgcataatgcccgaaaagatactgtatcagtttcttcccgtatccccgacgttggaattgcggataaacggcaatgttctttatctcaaaaatatcttctgcttcgcgggtgacgacacaggatgctctgatactgccgttctcggacaacacgaacatttcaccgcgttccagataacggtctatcatggattcttgttcatcggccaaaagcagcaggtcgaggtattgtttcttattatggagcacaggctgtatacttatcatttcattgctgtttgaacgggtttgtatggcaaagataatccttatgggcatagaaccaaacaaaacaccaggaaatattgttgatttccaacatggaatagattaatggttatggataaaatgaagtctttgttcttttttttgacgctttggacatttttgccactttttgcaggctatgctcctgataatgtgcaaactgccctgacgaaaatgtatccttccgccaaaggggtagcctggtcgcaggacgaggagtattacgttgcggattttatgatgaacggatttgataccaaggtctggttcaatacggatgcagagtgggtaatgaagcaaacggattgggaaaccctggatgaggtgcctgccgccgtattcaacgcttttgcagccagtcagttttcggacggagtggtacagaatgttgtttgggtgcaatttcccaaatggcaacctattgtagccatacaggtgggcaggccgaacgtgcagataaaatatcagatattgtttactccgaacggtgaagttctccgccagcagaatatcacttacgcttacaatacgcttggggcaagtactttcctgtaatcagacgtgagacgccccgctgtcgggtaggcatctcatttctgtcgcttggtataaaaaacaaggctgtgtattttttatactctctgtttacgctatctttgccgcaaagaaagactttatcttatgaatcggactacttttctgcaagatgtttacagtgttgttgccgctattcctgaaggatgcgttgtaacctacgggcagattgccagtttggtaggcagacctcagtgctcgcgtatggtggggcaggctatgcacaacgtaccggaggaattgcatttgccttgtcatagggttgtaaacagctggggcagattagtgccgggttggacggagcaaagagtattgttggagaatgaaggtgtccggtttaagacaaacggctttgtagatatgaaaaagtctcaatgggaatttatgaaagaacaataaactaacgaataataatcgaaatatgaaatttataggtgcacatgtatctgccggcggcggtgtggagctggctcccgtcaatgcccatggaataggagcgaatgcttttgccctgtttaccaagaatcagcgtcagtgggtggcgaagcccctgacgcaggaaagtattgccttgtttaaggagaattgcaggaaatatgctttggaggcacgttatattcttccacatgacagttatctgataaatctgggacatcccgaagaagaaggactggagaagagccgtgcggcttttctggatgagatgcgacgttgtgaggaactggggctggaactgctgaatttccatccgggcagccatttaaataagatttcggttgaggcttgcctggacagggttgccgaatcgattaatattaccttaggcaagacgcaaggcgtaacggcagtcattgaaaatacggcaggacagggcagcaatgtaggcaatgagttttggcaactgaaacatatcatcgaccgtgtggaagacaagtcgcgcgtaggtgtctgccttgatacgtgccatacgtatacggcgggttatgatatcgtaaatgaatacgacaaggttttcgacgaattcgataagaccgttggcttcggttttctgcgcgccatacacttgaacgattcgaaaaaagcgttgggtagccgtgtagaccgtcacgacagtatcggcaaggggcttatcggcttggatttcttcaaacgttttatgaaagacgagcgttttaacgatatgccggtgatactcgaaactccggatgaaacgctttgggcggaagaaatcagcatgctgcgtagttttgaataattgtccggaaataaatgacgcggactttcgtggatgttattaattgtatccacgaaagtccgcgttatttgtgcccgaattatacgataatgaagtttattcgtttctcgtgatgcgtttgctgcctgctacctgcattattggttgaccttaacgtccttccactcaaaattagagataatctctttatcgcattgggcattctttgccttgatattcaaattctcgaaagtgaaatccttcaattcgtattggtcggactttctgacgttgaagaatatgtcgcagctcaggctgatattgcgcagcgtcacgttgttggcacgtgagagggggatgtccttgcggcctttgaggtcgaagaactgtgtccacggtttgatgagcagcatgcttttggcatcgcctgtgatgtcttccaccaggatgtattcgtagtgttgcggcgtatcgggacgcatcttcagccacaacaggcgcgtggcattgctgattttgcagcggcggagaatgatgttgcggttgtgtatcgactcgctgccgcatgtcagaccgctgtggcaaaagccgtatgtgcagtcttctatgataatgttggtgttgctgccgttattagggtccttatccgcccacgggcctttgccgcctttcagtgccacggcatcgtcgttgacggacatatagcagtttttcaccagtacattgctgcagacgtcaatatcgatcgcatcgctgctcggtgctttcaccggggcggcaggagcgaaaatatggagattcagcagctttatgttattgcaacggtagatatgcgtagtccagaacggagagttcatgaggcgtactccggagatttgcacatcgttactgttggagatgtaaaccaggcgggggcgcaactcgtccatattggtacatttcgggataacctgccggcgcagccagaaagatttccagtacctgtgcccgttgccgttgattgtgcctttgccggaaatggtaaatccgtttaccttgtcggcattcaccagtgcggcgaagtatttcaggctttgtccttctatgcgggtgttgacaatggtgaagttgctgatgtcgtcacttcctttcagcactgcaccttcttccatgtatagatgcgttttcggcttgaagaagatggagccgctgaggaatgttcctttagggatgatgataacgccgccgccattctcggctgcccggtcgatgacggcctgtattttctccgtttgcaggattgtactgtcgtttgccacaccgtaatcggtaatggtatacttcttgcccagagtgtcgatgtttacgatttcgttctgtctgaaccagtcgggaataggcgtgccgtcggggaatttctcttgctcggacatttgcaggctgataaatgccgtaaataggaatgcaatgattttcatggtttccgataaatttaaaatctacttatgaattatgttgcaaacataggaaacttagtgcaatgccggacgaaagacgttgatttaaattctgtgtaaaatgacttttcagcctgcttagaacacgcattccacacggttgccgtcggggtcgagcactacgctttcaaaatatccgtctcccgatgtacggggttctccgctgatggtatatccggcacttcgcagcttttccgtcagttcgagaacctcttctttgctgtcgagtgcaaaggcgaagtgggtcaaaccgagcctgttttccccgatgggagtattctgtacatcggtacggctcatcagctccaggtcggctccgcagtcgaagcggataaagtaggattcaaaccctttttgagggttgacgtatttctcattgcttgtacctttgaagtaacggatatagaattctttcatttcttccagacggaaagtccagatggcgatgtgatgtattctcataagtcaatctgtttttgttttatacgatgcgtattcatctacggcttccattgcaggtgtaaaatgggaaaaggattccccgaagggtcggtttcatctcttccgatgagttggaagcccatgtgcagatagaaccggtgagctttttcgttttgctcattgacgtccactttatagatatgtttttcgtggagtgcgtattgcatcaactgcttgccatatccttttccctgttcatcgggatgtacaaagagcatttcaatgagttcgtcgctcagccccataaaggcagcgatttttccttcccggttacggatgatgtaaagctctacggcctggaaatattggttccgtaccaatggcttgtagaattgtatgttctcttctgtcaggaaatggtgggtactgcgaacggaggcttcccatacggtgagcagttcgtcataatcttgcggggtgggtcgaaggattttcatcggatacttgttttggggttattaatagtgattactgttggtataaacgtcagttgccggttataatcggttacttcataggttagaagtctgctttttgagtgatgcttattctctttccggtcaccggatgtgtaaactccagcatttcggcgtgcagatacaggcgttcggctttccgtccatagagctcgtcgcctatgatggggcagtgcagtccgagcgggtgggcggcatgcacccgaagctggtgggtacgtccggtgcggggataaaaggcgatacgggtacggttgtccttgcgttccagtacttcaaagtctgttacagcgggcttgccatatccggtatgcaccatttgccgggggcggtcgagtgggttcgggcataatggcagttcaaccgttcccgcatcttgagaaacgctgccttgaagcaacgcaatatagcgtttgcctacactgcggtttttaaactgcgcttgcaggttttggtggacttgcttggtttttgcaaccaccagcagtcccgatgtagccatatccaggcggtgtacaatcaacggaccgtccgcatcgggataccgctcgcgcatcatgctgtaaacggaaaccacatcttccttgccgggtacggacaacatccctgccggtttattaaccaccgccagccattcgtcttcgtagataatgtccaatgttttcttgccggactgcaactctttcagaattgggttctcgtctacttcaagaccttgcagcatatgtcccaatataggctcgcacttgcctttgcaggcgggatagtaatgtccgtgatgccgtatttccgttttgggggattctccccaccagaattctgccattgcaacaggcttccacccgtgcagataggcttgttgcaacagcttgggtgcggcgcactcaccggctcccgcaggcggggttttgtgtacggtctgtccgaagatgtcgcaaagcgtcttgacttctccccgataattcagcatcttgaattgttcgaacagtttttgctgcaaggcggcagaacgttgcttacgttcgcttttcaatacctgtatgccggcctcataatcggaaaccgtttgctgtaagggagcaatccgctctttccaggcacgttccatgcgtttgtattcggctttttggaactgactttcgcgtatcagggcgctctcttcctcaggcgtcattggagcaccgttgggtaaagccgcttcgcgtcttcgctcttcccgtttctctttggcgcgtttcatctgccgtttggcttcttccagcgtttcttgggcagtttgccgcagggcagccagttgttgtacctgtcgtttgtattcttcgtcctcttccaacaggccgatgcgcgtgttgatttgcgaaatctgttcttcctctatcttgaagaacccttgcggctgcaacaggtcgtagaccggcggtacgaaaaacggatgcacattactgcccgccagtatgccggagaatgctgccaggtatcctgtttcaccctcttgagtccttacaaccagaacaccgaacattttgccctgcgccaactcttctttccacgcttcctgcaaaccgagataggcttgcacctctttcgctgctgccacgcaaagcggatgaggtgtatagcaaaaagggaaagtaaatctttccggcaatggtatgtctgctacgggggtatggaaatggtgcaacatggcgagggaagttaatcgtcaatcaaattatcattgtccgtattgataatgtagggaatgttgtcattctcctcttccggaacggacaggacatcttccgcatccttctgttgcggcaagggatgcggatacgctgatttctttttcttctttccgtatttgcgttccctctcccaggcagctttgcgcgcctgatactgttcgtattggttttccagatagttgtcggccataatctgtcgtttataaagtattcaacttttgctttccaaatacagagaatcagggtatgctctgtattattttcttcatgctgttaaattttttacgtctctgtgttcagtctgtatagactccgaaaatctgtttatcgctcggtgggaagtgagaactcctgccagtcgtattgttgcccgtttccgtcggctacggccacccgtatggtgacatttcccgtctttatccgctcgcctgcgctgatggtggcggtgtatttcacgccgttgtgaggggcgatttgctccaccattacaggtggtgaaatgtaaatgcgcttcatacctgtggtttcggtaaccatcggtaccacattatatatagtctgtttaccttcgttcatgatttcgaaaattactttgcttttctcgcccgaactgattacgtggtcacggctgtcgtctatgaaacggatgttgcgtatccttaggttatcgaagacgcttggagtgggatacgtttcgtgctgcggcttgtagggctccgttctttctatccggtaaccgtatgcctcttgtttgggagcagacacagcatttccaatggctgctccggcaatggttccgataattgtaccgatggccgaaccccggtaaccgccccgccagccgccattattgtcgcctatcagaccgccgatggcaccgccgacatttccgccgatggctgcacctgcaaatattgcaccgggatcgcccgataccgtttggcttgtgccgcaacccgacaggatgagcaacgaagcggttaacactccaatctgtctcttcatatcgttaagctttggttagttgtacaaagatagtgaaatatatggtaaatagcctgttctcttttactcttttgtttcttcttaatacataaaaccctcaggtatcataaggctatattctaaatgttgtgccacttagctggcacaaatgtgcctattaataggcacaaccttgcctattaaaaggcaaaggttggcatgtcataatgtattgctccaataataatcttcaaagtaagaatcgaattcaatggagaaagttactccgcactctttgagtatgtttatgatattttgttgctcggcaggagataatgcccgttcgccattgcggacacgatagtaggtacggcggctggaattactgatgacccggttgatgaagaagtgtgtttgtttggcggtgaggttttccagaatcccgagaaagcctctggcatacctcacctgcttattggagcaaaagtaagggcactcattcttgaacttggctaaatgcttgggattgatggcactgcaagatataagctcttccggcgaaagcctttctgccaattgcctgaggcaagtttctgctttattgcattgccggttgatacaccataggaaattattgggaacatctgaaaatgcaagttctttttctttcattatgaattgcggtttatgtgaggactctgataactatctgcaaatgtagccattcttattcttattaggcgtgagatgtttataaaaaaatctattattgctcttttatcaaaatgttatgtttatattcgcaaaaaaacagaaactgattattaaggaaggatattatgcttgcatatacatacatcgaacatggaagattcggtctgttggacaagccaaagcccgaattgaaggactctcgcgacgctattgtccgcgtgacacttggtagcatctgtaccagtgatttgcatatcaaacatggcagtgtgccgcgtgctgttccgggaataacggtagggcatgaaatggtgggcgttgttgaacaggttgggagtcgtgttacttcggtcaaaccaggcgacagggttaccgtcaatgttgagactttttgcggtgagtgttttttctgccaacacggatatgtgaataactgtacggatgtgaatggtggttgggcattaggatgccgtattgacggcggccaggcggagtatgtcagggttccttatgccgaccggggattgaaccgcattcccgattcggtgagtgatgaacaggcgctttttgtaggcgatgtgctggctacgggattttgggcggcacgcatttcggagatttccggggatgatacggttcttgtcataggagccggtcctacggggatatgtactttgctttgcgtgatgctgaagaaaccgaagcgtatcattgtttgtgaaaagtcctctgaaagaattcggtttatccgtgaacattatcctgatgtattggtgacggagccggaagagtgtaaggagtttgtacttcgtaacagcgatcacggaggcgctgatgtcgtgctggaagtggcaggagccggagacactttccgcctggcgtgggaatgtgcccgtcccaatgcggtggttacggttgtggcgctttatgacaatcctcaaatacttcctttgcccgatatgtatggtaagaatctgactttcaagaccggtggagtggatggatgcgattgtgccgagattctctgtttgatagaggcgggaaagattgataccacgccgcttatcacgcaccgttttcccctgacaaaaatcgaagaagcataccgcgtattcgaaaacaggctggacggggtgattaaagtggcgatagcgggaaaataa

SEQ ID NO: 123 - DNA, 7422 bp, unidentified
  source 1..7422: mol_type = unassigned DNA
atgaataataaaatcactaataccgatattaatagttttgaagaattccttataaatgagaataagagcagaacaactcttgataaatatatgcgggatatacgaagatttcaaatctttctttctgataactgttacccaatatctcaggatactgcagataaatatattgagattcttaaaaatgctgattccagtataagcagcataaatacaattatatcatgtataaacacattttgtaattttataggaagaaatgatattcactgcgttaatcttaagaaatctaagaccgaatcaacagattctaacttacttacagttgatgaatataaccaactccttaaaaccgctataaacaataacgattatagaatagctatgttaattcaagtccttggaaatacagatataagattaaacgaattgcaataccttactacacactctttagaaatgggaaaaattactgttatacgttacagcaaagaatataacatcagaattccagatgatttattggatggcttatacgaatatatagaccatgaagcaataataaatggggtgattttctgtactagaaaaggcacccctcttgaaagatctaatatatggagattgattaagaaactggctgttgatgctgggattaatccggataaagtttatccgcagaatctgaagcagcagcttgggaagaaatattatagtataaaatactaatctacttcatactcttctcttaatctatcaatcaactcaaatgtaaaaaactctgtacctatgtcaggtatcagttccagtcttgcaatggtttcttcttaatatggctttatcattcaaatcaatcggcacaaatatgcgtatattatcctgttcattctcacagtctttatattcaggataatcaagcaatgatttatctgctagttatggttcattatataaatcaactttgtatcattaggtattggatacggatctattctatgatgctccatctatattctccttgtcaaatatttctacaataattacagtcacaagccatgtaaatttttccaagcctctatcaattcatctctgttatctttataccattcttcaatttcttaaatcattgatgttgaccattttttattaccatctttatataactttccgtcgcttaatcggaaaacagcctcatattcattatgtaacacatgaatttctatgaaatctatttaatatatctaacaatctatatttattatgttctgatatattattttctacaatatatattaatctcttatacttgaacattgttttcacataatgattctatttatactcctcacatctcagaaaagaaatcactactataataaactacattcattcaaatctccttcttgcaccattctactgtctctgcaattccctctgaaaacttataatccggtgcaaatcctgtatctttaactaaatcctgtatatctgcacacaagtacataacctggcgtggaccataggcaacttctccaaaaccaatctctgcttccggattaaccgcatttcttatatcctcgatataatccttaagcggtcttgcctctcccccaccaatacagtaaaccttgccattaatacctttttctcctagtaaataaaatgccttccccgcgtccttggagtacagataatcccacatctgctctccctttgtacatgatggcttctctcctattaacagctttcctattgtagacataaccatcgtagcacttccgtcatatggaccatatacactaagtattcttgtccatatatgtctgattcccaacttttcacactggattcttgtcatctgtcctgcacacagctttgccattccatagccattttctggaaatgcaggaacctgcgaattgagctttccttccactcttccgtattctgcctgtgaaccagcccctataaatgcactgcaccccataacagccgctgcatttacagcgtccagtgcatatttcacattcatattctgtatatacatatcattgcggcagtcaccaaatgttccatcccacccaaagtgatagaacacatcaggcttaattcctgtcgcctgcacaagctgtggcagtttatcaagctcactaagatcacattcaactttcttaagtgaatctgattccttaattctgtaagaacgctttgagttctttcttacaaccgctataactttaacattattcttcataagagcatctataagacctaagcctactgctcctgtacatcctgtaacaactgccgcctgcattgtgcctcctgttgttttactacttctcttcgtccattaatggaataaacatctgtttctttaattcttcccttggaaggaacggtgcgagatcctccaatggagggcttacaagtgtaccatcctctaatctcttggtactgctcttaggctcccatacctgcttagtatctgtaaatatctcacagaatacaggtccgtcttcctttaatacctcatctacagtcttcttcatctcttcattagatgatgcactgtaatacttatatccaaaggcctctgcaatcttcttgaattcagggaatgagaggtctcctgattctggtccgattccaatcttgcaatgctccttaaacagattattctgtgtaagtcttattgaatgatatccattattgttgataaggaatatcttgattggaagcttattagtaagtattgtctgcaattcctgaaggttcatcataatacttccatcaccttcaagacatattgtatttcttcttccgccaccaatacatgttccaattgctgccgggagtccatatcccatgcttgctatagcactgttattagccatgcggcttcccttctgtattacatatgcctgattacctacaacacagcatgctccgttggatactgccgtaagactgttctctggaagtctgctgcttaagtatcttacaaatgcatatacatttgcagtgcttccattctcctcccactgtcttggctgtactgccggatattccttcttccatctctgtgttgttgcgagccattcaccacctgctgatacaggagcaatagctgccgcctgcttatcaagctttgtgaggaaatccttagcgtcagcccataccggcatctcaacatggatagtaggcttctttaactcagccttatcaacatcaaccattatgacctctgctgctcttgcccatgttttccagttatatccagtctgtctgatagatattcttgtacctacagcaagtattaaatcggcattctgaatagcccagttacctggtctgtcgcccatattgcctgctcttccacaatacagaggattatcatcttctattaaatccactgcattccagtatgtaacaataggtatattaagcttttcggcaactgacctgaacacatcataagcgcctgaaagtcttattccataacctgcatggaatacaggtcttttggcattcttaatcttctcaagtacagtctttacaacatcttcacttacctgtggtggaagctttgcgtcatcctctgccggatcatatccttcaagctcatcagtctcaatatatccaccctggaaattaacaggaatatcaatccatacaggacctggtcttcctgttgttgccaagtgccatgccttttcaagtgcatatcggatattcttaggatcttctatcatagttgcgtactttgtcatattagacacggatttaactatgtcgtattcctggtctcccattgcacgaagtggtgtctctgtaaactgaagtgcatatcttgaggttgtgtcgtaacgaacctgtccacttataataaacataggaatggaatccagccatccacctactacacctgtaagtgcattcgttccacccggtccagttgtaacacatactgctgcaattctgttatcaattcttgcatacgcttcggcagctatggcacacgcctgctcatgatgattgtatgttaccttaagcttttcattatgtcccaatgcatcattaagatgcattgctccacctccaactacagaaaacacatctgtaacgccatgttccacaaggaaattggcaacataatctgctaaacgaattctcataaactgccctccacatatactggttaattactgattaacggcttccttaatagtcttagccatataatcaatcatctcatctgtcattcctggatatacacctacccagaatgtatctctcataattctgtctgttgtttcaagtccgcctactactctgtagccttctcctgttgctctcatctcatcaaagcatgggtgctttataagatttcctgcaaaaagatttcttgtctgtactccgtggctctctacatactcaactactgcctttctgtcaattccttcctttactgttataaggaatccgaaccagcttggtcttgagttctcacatggtacaggaagaattaccttatcctctatatctgcaagtgctgctcttaatctgtcaaagttatgtcttcttctctcaacaaatgatgggaacttctcaagctgtgcacagcctaccgctgcctgcatatctgttgctttaagattatatccaaaatgtgaatatacatacttgtggtcatatcctaatggaagttctccatactgcttgtcaaatctgtgtccacagaggttgtcctttcctgatgggcatacacagtcacgtccccagtctctgaatgaacggatacacttattaagaagtgcattattagtatatactgctcctccttcacccattgtcatatgatgtggtgggtagaagctgcttgttccaatatctccgatagttcctgtgaacttttcttctccattgattgtgtacttagaaccaagtgcgtcacagttatcttctacaagccagagattgtgcttgtcacaaaatgcctttactgctgaaagatcaaatggattaccaagtgtatgtgcaatcataacagccttagttttgtctgaaagtgcatcttcaagctttgtaacatcaatgttgtactgtggaatagtaacatcaacaaatacaggtactgcaccatactggatagccggtgttattgttgtagggaaacctgctgctactgtgataatctcatcacctctcttgattcttctgtctccgagaagtggtgatgtaagtgccataaatgcattaaggttggcagatgaaccagagtttactactgatacatactttactccgagatattctccaagcttcttctcaaattcatctgtataacggcctgctgtaagccagaattcaagtgctgaatcaacaagattcatcatttccttgctgtcatatactctgctcgcataagaaattctgtcaccttccttatactgcttctggttatggtacttcttgcagtattcatctacaataccaagaatctcctgtcttgcttctaattcattcttattgtcaaacatatcatatcctctttcttattttattaactctgccctactcagtaaagaattcttcaatctctttatccatacatgcaacggcatctccgcctgctgcatatacctttgaccattcaacactcttctcaattgctgtatcaaagttccatctgggcttccagccaaatgttgtctttaactttgagcagtctaactttaagaagttggcttcgtgaggtcctccgtcatatttattaatccatgaaagaccttctccccacttgttacagaaagtatcaacaagtgttcctgttgtaatgcagtcactttcatcaggtcctacattatagaaacctgcatacttcttatcactgtactgctcctttgcaatcataagataagctgcaagcggctcaagtacatgctggtatggtcttgttgaatgtggattacgcacaattatatcttccttcttaactgcagctcttacacagtcaggaacgattctgtcattggcgaaatctcctccgcctataacattaccggctcttgctgttgaaactgcaacctccatatcattgaaaaatgaattgatatagctgtgtgttacaagctctgaacatgacttgctgttagagtatgggtcatatccgtcaagaggctcattctctctgtatccccatgcccactcattattatggtaaaccttgtctgttgttacatttaaaaatgattttacacacgggttaagtcttacacattcacagatattaactgttcccataacattagtttcataagtatatacagggtctttgtatgattcccttacgataggctgtgctgcaagatgaagcactatctcaggctgtgtctcttcaaacaccttcttaagatgctcaagatctcttatatcacctattacagaattcatcttatcctctacatctatcattgaaaaaaggttaggctcagtaggtggaacaagtgaataacctgtcacttctgctcctgctttaaaaaggattctgcaaagccatgagcctttgaatcctgtatgtcctgtaacaagaaccttctttcctttataaaaacttaaatccatcttaatcctcccggcttagtcccatttcttccaaggagctgttccagttgcaagatacttctcgagcatatccatctctctcttggtatccatgcactgccagaagcccttatgcatataggacattaactgaccttcctttgcaagtttttctagtggttctctctcaaatacagtgtcatcaccatcaatatagtcaaatatttcaggattaagcaccatataacctgcattgataggtgcaccgtctgtatggctcttctctctgaatgacttaacagcgttgtctcctccgatatcaagtacacccttctgctgttcaagcattacggctgtaagagtagcaatcttgccatgctccttatggaactcaacaagcttgttcatgtctacatcacagacaccgtctccatatgtcataaggaatggctcgtcccctacatatttctggatacgcttgattcgtcctccagtcattgtattaagacctgtatcaactacagtaaccttccatggctcacaatgctgctcgtgaataatcatatcgttagagccttttgtgaagtcaaatgtaatatcactgttatgaagaaaataatccgcaaaccattctttaattacatactgcttatatcctgcacatataataaactcatcaaaaccataataagcatattccttcataatatgccagagaattggctttcctcctatctctatcattggctttggcttaaactgactttcttcacttattcttgttccgaaacctccagccagtaaaacaactttcat

SEQ ID NO: 124 - DNA, 14109 bp, unidentified
  source 1..14109: mol_type = unassigned DNA
ttattctacattcttcaatgcttcatccattggaatttttcttattttcttatattgcaatgcacctattatggaatatgctgcaacacctatcacaaacatttccacaaggacatacgacggtgctttatatgcaagccatcccgggtatgtccccataattgctctccacaggaatcctattgtaaaatcggacagtggaacacttataacaagtgaaataaatacgactatcgccgtagctgcaacatacagcctcattatctcatttcccttataaccgagaatcttgactatcgaaattgcattggaattcttctcaagaataatctttgaaagaagataaaccataagcatataaagtgctacggcaaatacaagccatatataaaacattcttcccattgaatctgtaagctggtcggcaactattgtcatatcattttgtgtaagcttcgtagcaacatatttttcatcaatatcaagttcgttgtcagtaaaatatcccgaataatacgtatcctgtttatcaaaatcatcacggaatctgtctatgtccgtaaataccgccagacttgacggatagacatagcttccggcaattttataagtatattctttatcctcatatttttcttttaaagttattgtatcaccctttttaagcctgtatttatcaaggactccgtcagaaacatatatttcattatcttttaatcccgaaaaatcaatatcaaaatactgcgagtcttcatttaatccatataccgtaaattcatcattcaggccattgtctctttgcatttcaagctttgttatggcatatttttccgcttcattatctttaatttccacaggcatttttaaaatatactgatatttacaaggcatattatcaataattgtctttttatagtcattaagaaccggctgcataacaagtccgaacagcagcattatgcttgaaaatgcaattcctataagcattattatgtaactcgaaatattctggaaaattattcttgtcctgaaacgtgtaaaaaatttccattcaggaagcttaacagcctttctgtttttgcgttttttcaaatcacgccttataaacttcagaggtgacaatttcagcatttttgtgagcatgaaaagattaatcacaaacataagcacacaaggaataattgttgtcataacaaatgcataaggcgaccatattgtcgtgtatacagtaaggctgtaactgttatagtaaatggcagcaactatatctttaaatatcgtatatccaagtatattgccgataatcgcaccgataaacataattatcatcggcagttccatataatgtataacaagctctttacgtgtatatcccgatgcacggagcgtaccgataaccgtagattctttctcaattgtacttattgatgtaaccgcaaaaataaatgccatgataattattacaatatataaaagcaccattaccattgctgtatccgagcccatatcgtcacccgcaaaatgaattgcctgattatcaggctccggtacaaaatcagtcatcaccgcattttttgcaaggaatgttttaatatcgtctgatttatcttttttctctttatctgtcagcgatgtgttgtcatatttccatgcataacaatattttaaattattatcgcttattctgttaaatgcttccggtgtcacaacagcaactgtaaaattttgtgcatcaaacattaaatccgtattgcttctgaataatgcactgtagtcagataaggcaaccagccctgtaatctcatattcttttttatcaagagttactttatcgcccacttttaaatctgcactgtcagcaaattttctgtctattgcaatctctccgtctttttcgggaattcttcctttgtgtacgctcacaccatctatatcttcacgatttttataaattctgtaagtgtgctctccctcttcttcctctttgtaaaaaagactataaacagttatgtcctcttcatcttcaagtttgttttgcaatgtcccggtaatctcatcatttaaaataaaatgtccgtcttcgatattatattctttaaaactatcattgtatgtctttaccatactttttccggcgacgagaaatcccgacaccagaccaatcgtaagtgtcataaataaaaatatcacaagatattttccaaattcgtctttaagctctcttgggagtctttttctaagcggatttttcatatttaacctctactttccatttaccattcaagctgctcggccggaattttattttcattatcatattcttttcttattcttccatcatgcagatgaactactttatccgccatattttttatcgcatcattgtgagttactataattattgtattgccatactgtttatttactttttcaataagttgtaagatttcttttgatgtattgtaatccaatgctcctgtcggctcatcacaaattaaaatatccggattttttacgatagctcttcctattgccgttctttgctgctgtcctccggataactggttaggcagcttatctttatgttcccacaatcccagcgtgttaagaagctcattcaaatcaagcggactgtcgctaagatacgcaccgacctcaatattttcttttaccgtaagattaggaatgaggttatacatctgaaaaacgtatccgagatgctttcttctgtataacgaaagctgtttttctttcatgtcttcaagctttgcaccatcaattattatgttgccgccgtcagcctcatcaattccgcctataatattaagaagcgttgattttcccgaaccagatggacccagaagcacacatatttttcctttttcaaccccggttgtcacatccttgaggacatgattcctgttttccccctctccgtaatacttgttaatcttttcaatctctaaaaacataaatcctccttgttttgcgaagcaaaatccgagtcctatgacgaggagaggatttagcctccttgtttcgcgaagcaaaaacactctgcaattttatatttataacttttgttagttttcactaacccaagttcaaaaatttagtctgtaatcattcacgttatatgccatatgacatttttatgcgatacaacttacctaccgcgaatgtattacagacttaaaatcccgtcagattaacttttcgagactctttaaacttattgctattgttgatgtattatgtaacagtgctgatgttgtaggtggaattatacccgcaacgccaagtacaataagggttgaattgatacccataatcattctgtaattcttatggatacgtttcataagtgcattgcttatatgttttaatgcaaccagttcatagaggtcatttccctcaactgtgacatctgcaatttctcttgcaagctccgctccgtcacttattgctattcctacatctgctgcagaaagtgccggtgaatcgttaattccgtctccaaccatgattactttatgtccaagcgatttttctttttcaacaaattttgccttatcttccggcagaacttctgaataatactcatcaacacctatttttgcagcaacagcttttgctgtacgctcactgtcacctgtcatcattacagctttctttattcccgcttctttaagcttctttataatatctgctgcttcttctcttataggatcctctatacagattactgccgcaagttcattttcgattgccatatacaatcttgaatattcatccggcaggccatcaaataattccttcttatcatcaggtataatgcatttttcatcttcaaatacaaaatgataacttccgattattacttttctgccttctatctgtgatgaaataccatgtgcaactatgtattctacttttgaatgcatttcctcatgcacaagattcttattcctggcagctcccacaacagccttagccattgaatgaggaaaatgttcttcaagacatgctgcaattcttaaaagctcatcttctccaagtccattaaatgaaacaacctgtttaactgtaggttctgccttagtaagtgtgccggtcttatcaaatactattgtatctgcctcagcaatggcttccatatactttccgccttttacagttgcactatatgttcctgcctcattaatagcacttaacactgacaaaggcattgaaagctttaatgcacatgaataatcaaccatgagtattgataacgcctttgtcacatttcttgtaaataaatatgtgagtgcagttcctgcaagtgaataaggtacgagctgatctgcaagatgtgatgctttgctctcaactgatgatttgagcttttctgattcttctatcatatgaacaatattctcatacttgcttccaccattagtagaacgcactgaaattgtaatctcgccctcttcaactactgttccggcatatacaatcgcagattcaccttttcttaccggcattgattcacctgtcattgaagcctgatttaccattgcttccccggaaactacttcgccatcaaaaggaattacattgccgactcttattcttacattatcgcctgcctcaatttcatctgatggaacaagtatttcctgtccgtcttttacaagccatacctttcctatattaagagacatgcttctggcaaggtcgtctacggatttcttatgtgtccactcttcaagaatatcacctatgccaagcagaaacattattgagcctgctgttgctgtatcatttcttaaaatagaaactccaattgctgtcgcatcaagaaccggaacctcaatctttccttttgcgagagttcttatcccctcccagatatacttgaacgaccttactattgtaatgcctgcccttataggaagtggtacgaaaagcttattgccaactctcaaaacaaccctgtttataagcttttccttgtaataattattaagttccctgcctgaattatcaagatatgtctgtggaacatccacatttttataattaaactgctgtaacagtttaatcacatgtgacctgctgccgctgtaacagataactacatcattaactctttcattaactttaacttttgtgacacatttctgtccatcaaagtaatattgcaaaatgtctgcctcacggcaagtcatctcattctgctttaccctgacacgcattcttcctctaatctcatctttaataacaaatttcataagattgtgcctctgtatatttctaaattatgtaatactatttatacaataattattgttcactgcatccacagccacattcagattcttctgacttagcttcctctaactctacatcctctgtagcagattcatcctcgtactcagctgcagctgccttacggtcatcattaatctgaactgctcctgcataaatgtcctcgcaattatcctgtacatttgctgcaatcttcataatacaatctttcattctaaggacagctgctgtgcatcctgtatatactttcttggcatctttacttgaaagaagtttgattcctgctgttccaaataaaacgcctgccgcaaaaagtcctgttttctttccgtcaaattttactgccataattatttcctccttgtgtttacgggttaattaatttcctgttttttccatatttttaacgaaatatatctcgttcaatttagtttacacctgaaaaaaatcagccgcaacaaaaatatccttattgatatttctttatcaataaggatatttcatcaatttttattatatataatcatttttttatatagaaaatcatattatgtttaaacaacatattttagttataattccacaatctatgcatggaggtaaacatgaaaaaatctatatttcaatcaattatcctgctcgcacttataatggtgcttgcctgcttattctatcttacccccgataaaaaaagcaaaaattcccatcccgtatcatcaggaagtgtctcttacataaaacccggaagcggaataggcggtggcgacattaacggaaatgctgtcgccggcaaaaaatcacttcctatttattgtgtaaaacatgatgacagtgaaaaatgcatttctatatcatttgacgctgcctggggtgccgacgatacaatagaaattcttaacactctcgataaatataatgtaaaagcaacatttttcatgaccggcggctgggttgactcttatccagacatggtaaaagaaatctgctcacgaggccatgacctcggaaaccacagccataatcacaaacagatgagcaagctttccgcctctgaacaaaaagacgaaataatgtatgtaacagacaaagtcaaagaacttacaggatatgatgtatttcttttccgtcctccatacggtgactataattcaacgttgattaacactgtatatggatgtaaccattaccctatacaatggaacgttgacagccttgattggcgtgattatggagttgaaaacataataaaaaccgtcaccaatcacaaagctctcggtaacggttctataattcttatgcataacggtgcaaaatatactgccaaagctctcggcaccgtaattgaaacactccagtcacaaggatacaccttcattccaatatcagaaatgataatacgtgataattttcacatggatggaaccggaagacagattgcagattaaccacgctttttcatcccgacattcacagctgccataactagcatgccaactgcattaaatgcaagcacaagtattgctgctgtcattcctattctgtctgcaagaaaaccaactatctgcggcgtaactattccaccaagtgctgctatggcaagaaaaagtgacattcctgccgtagaacctttgataatgctgccgacacttgatactgttgtcggatatattccagcaaagaaaaagccaagtcccgcaattgccacagttattaccggaaggctgtgcgtcgctgtaagcaaaaagaaaaatattgttgtagcaacgcaatatgccagaataagtttatttttatcaacttttgatgataattttgctgtgagcagtcttccaagcattaccataacccatgtaactgatacaagattagtcgcatatgcactgctcattatgttcatactcttaaaatatgttacaaaccagccatttacacagttttcaagtccaagatataagaaaagcagtaatccacagacataaaatacaggacttttgtaaaatggctgtgccatgctgccctcattcttacccttcttagactcaacaggccagttgtaatctatttccatccatacatataagataacagacagtgctgaaccggcaattatagtataagccggtgcacgccatccaaatccgtttcctatataaagcgatgttataaatggtgcaagaaatgctcccgctgcaaatgtcatatgtaaaaggttaagtgccgtcggcttgccgtttgaattatcattgacaacagcattattgataatgctgacagaacctcgtccgattccgacaagaacaaacgctgcatatattaccggcaccggtggaagaagtgttataacaaaaagcattaccggtattaatgcagaaaatattattatagttgcttttcttcctatctttgatgccatcggcggattcacaaagcttgcaataagattacctattgcaaatgcagataaaaatccaccggcaacactgtaattaattcctgcttcttctataatataaggaagaattgcaccaactaaaagtaccatcgcaccatttacaaaaaatgaaaaatagcacggaaaaaacaatctgaattttgatttcatttttacctccaaaaatatgcatacaaaatggcacgaagctaacgattaacttcgtgccatttatgcggatgacaggaattgaacctgcacgtctgttgacaatagaacctaaatctatcgcgtctgccagttccgccacatccgcaagcaatatatatattatcacaaacagatttaaactgtcaagttcatccattcaatcactttatttgtacgcatttcccatttatgattttctgcacatatcttatatgcattttctgcaatatgttccaattcgtcgtgattcgtcagcagtcttttaattttatcagccgcggcatcaatattttcaagattataaaaaataatattctctccatcaataaaattatctttcagatatccgcttgtatccgtaacacagacagcaccgtttaacattgaattaaacactctgtcgtgtgctccctgtttaaaccacggcattacatttactgatatttttgagcggcttatcatgtcaagacattcctgtgacgaaacatttccggcagtaataatattttccgggtgacgacattcaagcatatcccagccggcaccaaatgtatgaacctttattccactgtccgcaagccttgcaatcacttctgccctgaaataaaatcttacagacaaatcaacaaacatcaggttaggcattatctgttttaactcatcgtccgtaaattgaataccctgattctttagttcttcttcggctgcatcttcaacaatcatttcagggttttctataagctttcttacaagtcctctgtagaattcctgataatcactgtcaagatgtgctataaacctgtcaaaagaatttacaggtgtataatttcctgtaaatataacatcaatgtcacgcttatctactggcagaaatttatctgaaagaatatctcttttttcattaagttcagttccgccaagcacaagaaatccgtcatcaggtgcaagctgcacaccaggaaaaaaccttttcatataccttatatggttcttgtcaatacttatctgcatataattttccggacgcagcggcagatatttatgataatacagcggatggtcaacaaccatgttataaacgggaattttcgtttcattccagaagcttccgccttcaaatgattcgtcataaagcccgtcttcgcctgcaataccattaaaattaaatgtgaacgccatgaatttttttgatttatcagccttataaaaatcacagagctgttttgctgacaatccgcttaatacaaggtcaaaccaatatatttcatatccgtgtttttgaaatgtttttgacatctcaatactgaaatattcctgtgtctcaactccgcccttaaataaaatgacgactttatccattttaacagttccttattgcctcaaatatattatcgagtgcggaaacgtcaagatcttctgcaaatccgccatccacttttgatgctgcctcaggatttatcggaagcttagcaaccgccttaatatcatgttgtgcagcaatctcatcaatatggctctttccaaagatttcatgtttcttaccgcagtcaggacattcaaagtaagacatattttcaacaattccaagtacaggaatatccatcatatttgccatattaaccgccttttccactatcattgaaacaagctcctgcggagatgtaacaacaacaattcctgcaacaggaagtgactggaataccgtaagcggaacatcacctgttcccggcggacagtcaacaaacatacagtcaatatctccccattttacattttcccagaattcctttactgcactggctattactggtcctctccatataacaggatctgtctcgttatccatcaaaagattcatagacattaccttgattccgcccttcgtaacttcaggataaataactgttccttcttcatcacactttgccttctctttaagtccgaatgacttaggaattgatggacctgttatatcggcatccatgatagcagttttcagaccgttttttgccgaattaacagcaagaagcgatgttaccatagatttgccgacaccgccttttccgctcacaaccgcaattactttctttactcccgcatagttatctttatttttttgctcctctactctttcggcacagttagagccgcagcttgaacaatcatgtgtacattcttcactcattatatatactccttttcccttctcccaaatgttggatgtttctcccaattataatatattttgggagaaaattaaactaatcgggagaaaaataatttacataaaaataatttattatattattctaaccacttgtaccgttttaattaacggtatcaaccataaaaagctgcaccttaacggtttttacccgtcaaagtgcagctcttttcattacacagattatttctatggcatatttaatcaaatctgtatattttttacatttaacttacatcgataaaatcattttttacctgcaaatacaggtgttgaaaggtatctgtctcctgaatcaggaagcaaaactacaattgtctttcctttgttttcaggtctttttgcaagaatgtcagcagcctttaatgcagctcccgaacttatacctacaagtataccctctgaaaatgcaatgtttctcatttcttcaaaagcatcatcattttcaatttttataatctcatcatatactgatgtatcaagagtttttggaatgaatccggctccgattccctgaattttatgaggaccggctttgccttctgaaagtacagggcttgtggcaggctctactgctacaatttttacatcaggcttcacactctttaaatattcacctacacctgatattgttccgccagtccctactccggcaacaaatatatccaccttgccttctgtctgtttccagatttcaggacctgttgtcttgatatgtacctttggatttgccatgttatcaaactgtgcaagaataactgaacccggaatctgctcatgaagttcctcagctttttcaattgcacccttcatgcctttaaatccatcagtaagtacaatttcagcaccgtatgcttttaaaatattgcgtctttctattgtcatagtctcaggaagagtaagtattgccttatatccttttatagccgcaactgatgcaattccaatacctgtatttcctgaagtcggctctataattgtagctcccggctttaaaagccctttttcctcggcatcttcaatcattgacaaagccactctgtcttttacagaacctgtaggattaaaatattcaagttttgctattacacttacatcactgattccagacttcttcatatatctgtgaagaaataaaagtggtgtatttcctattaaatccgttgcactatgatacatattctccattttcttactctttctccatttcttaaatgtttctgagatattccataactgaatatatcgcattggcaccgtctgccgcagcagttacaacctgtcttaactgctttgtgcggacatcaccggctgcaaacaggccatttactgtcgtctttgtatcttccgatgcctttacataattgctctcgtcgagcacgccgaactcttttaacagttctgtctggggaatcattccgactgctgcaaaaagtccgcttatattaagctttgttttattgtcaagaattataccgtcaatttttttatctccggtgatttcctcaactctggcattcactataatttctacattttctttttgttttaacttctcaagtgttgaagcagaacctctgaaaaattcacgtctgtggacaaggtataccttttcacatatgtcagaaagatacattgcatcatcaagtgcagtatcaccgccgccgattactgcaactctctttcctttatagaaagcaccatcacatacagcacaaaatgacaatcctctgccataatatttttcttcacccggtacgccaagtggtctgtttttacagcctgtggcatatataaccgctttactttcaagcgttatatcttcatcacagcctattatccatatcccgtctttttgccctaaagacaaaacctgtgcttccgtgaattcgacgccgagactttctgcatgctcacggaacttttcaccgaggctgtaaccgtcaattcccggaattcccggataattgtcaactctgctgctctctgctatctgacctgttccaagatattctttttccacaactgcaacattaagattagctcttttggcatagattgctgcggtaatacccgcaggaccgcttcctataataacaacatctaacatataactaattcttcctttgtcgatacatcgccctcaatgtgaaatgaattaagcaccggcttttccggctccattaatgaaagaatcatataacttgccttgctgtcatatgcaagacgtttatcttcttctgaaggtcttgaaggtgattccggatgtgaatgccagttgccaagcggaacaagaccatttgccctcatatccttaactgctgcaagctgctctttcgggtcgagtgaaaaatgctcatttgaatggtcaatatttgtaagaatatatacttttttaatctctttatcaccgccattcttaacgcctgcaataagtccgcatgcctcttccggaacgcatgactttgcatgttctaagataagctcataatctttttttgtcatcgaaatcataatctgctcctttattgaacattattttttcagtagttcattgcactttatttatcagtacattctacctgttcgtagtcgataagttctgttattgtaggatgacttccgcatactgcacaaccatctgtatttgatggaagtttaatcttgtggaattcctgattaattgcatcgtatgtaagaaggtaacctgtaagaagcttgcctacacctgttatgtatttgatagcttccatagcctgaagacttccgattacgcctcccatggcaccgattacaccagcctgcttacatgtaggaactgcatcctttggtggtggattcttgaatacacatctgtagcatggtccttctcccggaacataagtcatgagctgacccttgaatctgataattccggcatgtgaaaatggcttcttagccataacacaggcatcattaataaggaattttgcagggaaattatctgttccgtcaattatgaaatcataatccttgattatgtccatgatattttcacttgtaaggaattctctgtatgtattaactgtaacatcaggattcatggcattgattgtctcttttgcagacttaacctttgccttgccgatatcagctgtctgatgaataatctgtctctgaagattgcttaaatctacatcatcggcatcaacgattcctattgtacctacacctgctgctgcaagatacattgcagccggtgctccgagtccgccggcacctacgataagtaccttcgcattaagaagctttctctggcctttggcacctacttcttttaaaatgatatgtcttgaataacgttcaatctgttcatcagtcaatgccatagcttccacctcccatgaagtaaaggaattctacattatcgccatcctttaatactgtgctgtcctttgctgcactttcaacaaattcttcattaattgaaactgttacatactccggtgtctcaacattttccatttcaataagttccggtaatgtaagtccgtcttttacttctttttctgttcctgatactgtaatcttcatattttcctcatttccgcctgccggctttttattttatttatttgagattttcctcaatccattctacaagctgtggttttcttacagctccgctctgtcttgccttctcgcttcctttgtcaaacaaaagtagtgttggcacagactgtacatcgtaactttctgcaagctctgtatcaaaattaatattaaccttgtatactgcaagttttccttccatatcatcttctacatcaccgataacaggtgtcatctttttgcatggaacacagctgtctgaataaaaatcaaccagaacgggaatatcactttttaataccttgccttcaaattcatccttattaactcttgctgccat

SEQ ID NO: 125 - DNA, 5095 bp, unidentified
  source 1..5095: mol_type = unassigned DNA
tgcaagatgaacggcatgaactactccaccttcatgcacggcctgaaggtcgctggcattgagatcaaccggaagatgctggcggagatggctgtcaacgacgccgccgccttcacccagctgaccgagatcgccaagaaggcgtaagatccctttccagactatgtgagcagcgccctcccaaatgggagagcgctgctttttgtatatccaggggcggaggggaggcaatccccgttgtgccccttcggtcaggctttccggcagaagtacggcccgcggtccgcctcatggggctgcgcaaacgtccaggtgaaatccttgtctaccacgtaccagtccgctccgggaatggcgcgtgcatctgcgggcagggtaaccagctcctccgccgtcaccggccgcaccagaggctcaccctccggcggctcttcataataaaagaggtatttctcaccggatgcctccgacagagcctgccgggccgcgtcgccggacaggcagggcaccaggttccaggagaagagatgccacaggtaattcccatccgacagcacatgcctccccaactccgcgtcggacacgccgtcggcaaaaacgtccagccagcggttcttcacccgccgaatgtcggtggggaagggttcctcccagggaaccatggtggccacacaccggcagatgggcagcccctgctcatggaacttggcctcgtagtccgtcatgacgcccaccgggccattcgcatggaggtcccgggtgacctcggacagctcaaagccgaacagaggcagctcctccacggagaaggtgaagaggtcctgattgtccgtcttgaagtggatctgcccgcccatcttcagcacctggcggtacagccgcaggaagttgccgtgggtcaggcggcgcttggcgtggcggttgctgggccagggatcgcagaaattgatatagatccggtccgcctctcccggggcaaagaacaggggcagctggtcagcattggcgtcgatgaagaacacgttggtgagcccctgggccgcacaccgctccatggccatgaccatggcatccggcacccgctccacagcgatgaacagcacgtccggctccgccgccgctgtgccggcggtgaagcggcctttgccgcagcccagctccagccgcagctcccgggcctggggcatcagctcccgccacttgcccggcatggagtagggctcccggatcaggcggtcgccgcagcgctccatccgggggatcagattctttttctttcgcatccgcatgtgtcaacatcctcctgggtcggttcccgatccgatttcaggaagaccccgccggggagtcctccgtacattcagaatgctattgtaccatacagacccggcgctgtaaatggcggcgtggatttcctgcttgcgcggaaagcaaagagatgatatgatagcccaaatgggaggggggagcgatgtgcccaaggtgccctactgcggcagaagcatgttttatcaggaggcgggcgagggcccggtcctgatctttctccatggcaataccgcctcatcccggctgtttgagccgttgcttccactctatacgcctcatttccggtgtgtgctgctggactttctgggaaacgggcgctccgaccgggtggagtcgtttccggcggacctgtggcaggaagaggctcggcaggccctggccctgatccgggcggcgggctatgagaggccctgtctgctgggaaccagcggcggcgcctgggccgccatgaacgcggccctgctggcacccggcgcagtaggcgccgtagtggcggacagctttgacgggcggagccttcacccggggtttgcgcgggatttgacagcagagcgggaccgcgccaaaagagacaaggcagcccgggaattttatgcatggtgccagggaccggactgggaggcggtggtggaccgggacacggatgccctgttgcgatgcgccgcctccggacggccgctgttctgcggcccgctggagcagatgcggccgccagtgctcctgatggggagccgggaggaccccatgtgcagacaggatttggaagaggaatacaaggcgatggcggcgcagatgccccatgccgccgtgcgcttgtttgcatccggtgggcaccctgccattctttcccgggcggaggcggctaaggaggagatcctggcattttggctccggtgcgaggcggccgagaggctgtgagatttccggcagatacaactggaacgaagggccttgtgaatgcattaacaaaattgtataaagtttaacgaacaatttgtatgaagtgtaaaaaacgtgaaatttttcgcaaactgcacaaattatacttgataaatgccgccagtcaccctataataaagtttgtgagtaaattggcaatatcggaatgactctgtgttctcccggaggggcggcacagcccggccccctggagtgccgaaaggcatgaaacaaggaaaccaaacaatttattcaaaaataacaggaggaaaaatcatgaaggttgcagtttttggcgcaggtaccatgggcagcggcattgcgcaggttttcgcggcaaagggccacaccgccctgatgtatgccagctccgtcgcttccgcgcagaagcacaaggataagctggctgcttccctgcagaagcgggtggagaagggcaagatgacccaggaggctgtggacgccctgctggccaacgtgctggtggaggagaagtccgcctgcgccgacgcggatctcatcatcgagtgcgtcaaggaagacatggctaccaagaaggagctgctgaatgagctggacggcctgtgcaagcccgaggccatcttcgcctccaacacctcttctctgtctatcaccgagatgggcaacggtctgaagcaccccgtcatcggtatgcacttcttcaatcccgtgcccagcatgaagctggtggagatcatccgcggcgccaacaccacccaggagaccttcgatttcgtctataagctgtcccaggagatcggcaaggagcccgtcgaagtggctgaggcccccggtttcgtggtcaacaagatcctgatccccatgataaatgaggccatcggcctggtagagactggcgtcgcctccgtggccgacatcgacaaggccatgcagctgggcgccaaccatcccatgggccccctggctctgggcgacttcatcggcctggacgtgtgcttggccattatggagaccctgtacaatgagaccggcgactccaagtaccgtcccgcgctgctgctgcgcaagatggtccgcggcggcctgctgggcaagaagaccggcaagggcttctatgattattccaagtaattgaagtcagcaccaacaagaaaaggagttaatggtatatggattttcatctgacaaacgagcagcagatgctccggaagatgtaccgtgaattcgccgagaacgaagtgaagcctctggctgaggagatcgacgaagaggagcggttccccatggagaccgtcgaaaagatggccaagctggggatgatgggtatttacttccccaaggagtacggcggcgccggcggcgacgttctgtcctacgccatgtgcgtggaggaactggccaaggtctgcggcaccactgctgttatcgtttctgcccacacttccctgtgctgcgcccccatctttgagcacggcaccgaggagcagaagcggaagtatctgcccgacctgctctccggcaagaagatcggtgccttcggcctgaccgagcccaacgccggcacagacgcctccggccagcagaccctggcggtgctggagggcgaccactacgtcctcaacggttccaagtgcttcatcaccaacggcaacgtggccgataccttcgtggtgttcgccatgactgacaagtccaagggcaaccacggcatctctgccttcatcgtggagaaggacttccccggcttctccaccggcaagcacgagaagaagatgggcatccgcggctcctccacctgcgacctgatctttgaggactgcatcgttcccaaggagaatctgctgggcaaagagggcaagggcttcaagatcgccatgcagaccctggacggcggccggatcggcatcgccgcgcaggccctgggcctgggcgagggcgctgtcaacgaggctgtcaagtacacgcaggagcgtgtccagttcggcaagcgcctgagccagttccagaacactcagttccagctggccgacatgcacacccggatgcaggctgctcagtacctggtgtacgctgctgccatgaagaagcagaatcacgaggactattccatggacgcctccatggcgaagctgttcgccgctgaggctgcctccgatgtcacgcgccgcgccgtccagctgttcggcggctacggctacacccgcgagtatcccgtggagcgcatgatgcgcgacgccaagatcaccgagatctacgagggtaccagcgaggtccagcggatggttatttccagccgcctgggcgtgaagtaagataggaggtaaaggttaacatgaaaatcattgtttccatcaagcaggttcccgacacctccggtaaggtggcggtgaatccggacggcaccctgaaccgtgcgtccatgcagaccatcaccaaccccgacgatatgaacgccctggaggcggccctgaagatcaaggacgccaccggctgcaaggttgttgtggtgaccatgggtccgcctcccgctgccggtatgctccgcgaggcgctggctatgggcgctgacgaggccgtgctggtgtccgcccgcgagttcggcggttccgatacatacgccacttctcagatcctggctgccgccatcaacaagatcggcgtagaggctgacgacatcgtcatgtgcggccggcaggccatcgatggcgacactgcccaggtgggtccccagattgccgagaagctgcatctgccccaggtgacctacgccgccgacatccagaaggacggcgacaccatcaccgtcaagcggatgctggaggacggctacatgaccatcaaggtc

SEQ ID NO: 126 - DNA, 7708 bp, unidentified
  source 1..7708: mol_type = unassigned DNA
tcagcccacaaacacgtatttttccagccggtccatggcctcccgcaccagggaatggggcagggcggcgttgatgcggatgcagtcgccgtcgccgaagcccgcgccgctctgccagatgacgccatgctccacgccccggcggcggagatcatccggcgtgatgccgtggctgcggcaccaggccccgcagttgacgaacagcatatacgtcccctggggcagcatcatggtgacgccgggatagcggctttgcaggaagtcacggatataccgcaggttccggtccagcacggcgcacagctggtccacccacgccatgccctcgtcgctgtaggccccggtgagggcgtgcatggacagcacgttgcagtcgttgtagccggacaggtttccctgccgctggacccggcagcgaagccggtcattataaataatgtggtaagagccgatgagccccgccaggctgaaggtcttggtgggggcatagaaggccacggtgcgctcccgggcgtcccgggagacggactgagtggggatgtgggtgtatcccggcataatgagatcggaccagatctcatcggaaatgacggtgcagtcgttggcggtgtacacctccatggccttttccagctcccagcgctcccatacccggccgcagggattgtgaggggagcacaggatggccacatggatgtcgctttccttcagcttccggtccatgtccgcatagtccatgcgccagatgccctccgcgtcctgcgtcaggggcgtgtggatgatgggacggcccagccgctccagggtgtgggtgaagcccacataggtggggctgtggaccagaatcggctcgccggggcaggtcagggcctggaccacggagctgacgccgcccagaacgccgttttcatagccgatgtgctgccgctccaggccggtgacgccgtggcgcacctgctgccagcggatgatgctgtcaaagtaggcgccgctcagctgaaaatacccgaaattcgggtggtccagccgggcccggatggcctccagcaccggcggcgcggtggggaagctcatgtccgccacccacatggggatccgggaaaagccctccttgggctccaccccgtcataggggatcatgtccagggccagggcgtcccggccccgccggtccagaatggtatcgaaatcgtactgcatggttatcctccgttctccgttccggacaggtggaacacccgccgggtattttccagtatggccgcctccgcagtttccggcggcagatgcttcagccgggcgatctcctccacgatgcgcggcagcagcagggaggagttgcgcacccggctcagggattttttgctgcccgtccagggtacgtccggcagcacataggggctgtcggtctccaccagcagccggtccaggggagcgcgggccaccgcgtcccgcagggcctccgactcccggcgcagcagcgccccgccgatgcccagacagaaccccaggtccagataggcccgggccgtgtcccagtccccctggaagcagtggaccaccccgccgggcagctgacgccgcctgcgccgcagcatgaccagggcgtcctggtccgccatgcggatgtgcagcaccaggggcagtcccagccgccgggccaggcccagctgataccggaaccacagcagctgggtcagccggtgcttccggggcaggtgatagtccagcccggtctcgccgatggccgctacgccgggctcccgggcccagacctccagctgcctgcgctgccgccaaggggcctgatgggtccgggtggggtgcacgcccaccgccaggcggatgaagtccggatgctgccggtacagggcagcggttcggcggttggactcaaagtcgatggcgggctcgatggaaaggacaacgccgctctcccgcagacggttcagcaggtcctcccgctgtccctcccgggccgtcagctcgccggtgagatagcggaaggcaccgtcgaagcgcttgtggctgtagtgggcgtggctttcgatgatcatgtgcgccggtcctcctctccggggttacgcttcttccgactcctccggctgtgcaggggcctcccaggggaccatggtggccacacaccggttgatggtgactccctgctgatagaatttggcctcgtagtccgtcataacccccacggggccgtcggcgtggaggtcccgggtgacctgggacagccggaagccgaattgggggatctcctccagggaccactcgaacagcttgtcgttgtcgcttttgaagtgaatctcgccgcccatgggcagcacccggcggtataattgcaggaaattgccgtgggtcagacggcgctttttctggttacttctgggccaggggtcgcagaaattgatgtagatgcggtccacctcgccgggggcgaaaaactccggcaggcaggcggcgtcgccgtccacaaagaacacgttgtgcagccccgcgtcccgggcccgctccatggccaccaccattgcgtcggggaccttttccacggcgatcagcagcacgtccggctcggcggcggcggtctccgcggtgaagcggcccttgccgcagcccagctccacccgcagctcccgggcctccggcagcagctcccgccagcggccccgcagggctcgggggtcctcaatcagcagggcgccgcaggcttccatccggggcaccagattctttttctttctcatgcgcatgggtcatttcctcctgtgcggccatggccgcgaataaaataccaactctatatataccacaagatacacggttctgtaaacgaaaaaaatgctccatttggtgccggggacggttttgtgaccggattatgaacatgtcatattgaaaaatgcgcaaagaattttcatttcttttgtggaatatcctgaaaaagagaaaggcgggaaacaagggcttgataatttttagacgagggactataatacagactgtatgaagatcatgcacaagatgggaccgctatgggcggcatcccgtcgcgcgcccgccgctgcggcgggtgatcgaagcaaggaggaacgatcatgacgaatgttctgttggaaaagaagggccacattgccgttgccaccatcaaccggcccaaggccctcaatgccctgaactcccaggtgctggaggacatcgaccagctggtggaacaggtgaaggcggacgacgagatccgtgccctggtcatcaccggcagcggcgagaaggctttcgtggccggcgccgacatcggcgagatgagcaccctgactaaggccgagggcgaggccttcggcaagaagggcaacgacgtgttccgcaagctggagacgctgcccatccccaccatcgccgcagtcaacggctttgccctgggcggcggctgtgagctgtccatgagctgcgacatccgcctgtgcgccgaaaccgccgtgttcggccagccggaagcgggtctgggcatcaccccgggcttcggcggcacccagcgtctggcccgtctggtgggtatgggcatggccaagcagctgatctataccgccaagaacatcaaggccgacgaggccctgcgcatcggcctggtgaacgccgtgtatcccctggaggagctgatgcccgcagccgagaagatggccgagaccatcgccaagaacgcccccatcgccgtccgcgcctgcaagaaggccatcaacgacggtatgcaggtggatatcgaccgggccgtggccatcgaggagggcctgttcggcagctgcttcgagactgccgaccagaaggagggcatgggtgccttcctggaaaagcgcaagcacgagccctatcagaacaagtaaccccatttggttaattaacaggctccttaccgggcctgatgattaaaatcgctacttaaataaaaatttatttaggaggaacaatcatgaaagtcgcaatctttggtgcaggtactatgggcagcggtatcgctcaggttttcgcagcgaagggccacaccgctctgatgtatgcttccagcgttcccagcgctcagcgtcataaggacaagctggccgcctctctgaacaagaaggtcgcccgcggcaagatgactcaggaagctgctgatgatatcatgagccgcgtcctggtggaggagttcgaggccgccgccgatgccgacctggtcatcgagtgcgttgctgagaatatggccaccaagaaggagctgctgggccgcctggatgccatctgcaaggaagatgccatcttcgcttccaacacttcctctctgtccatcaccgagatgggccagggcctgaagcatcagctcatcggcatgcacttcttcaaccccgtgcccgccatgaagctggtggaagtcattgccggcggcaacacccccgccgagctggttgagaagatcaaggaactgtccgtcgagatcggcaagacccccgtggtggtcaacgaggcccccggctttgtggtcaacaagatcctgatcccctattgcaacgagggcgtttgcgttctgcaggagggcgttgcctctgcggaagatatcgatattgctatgcagctgggctgcaatcaccccatgggccccctgcacctgggcgatctgatcggctgggacatcgtgctgaacatcatggacgtgctgtataacgagacccacgatagcaagtatcgcgcaaacgtgctgatccggaagatggttcgtgccggcaagttgggcatcaagtccggcgagggcttcttcaactacaaaaagtaaatctgtaaaggagaaaagagtatggatttccatctgacgaaggaacagctgctcgttcgcaagatgtaccgcgaattcgcagagaacgaagtaaagcctctggccgctgagatcgacgaagaagagcgtttccccatggaaaccgtcgagaagatggcgaagttgggcatgatgggtatttatttccccaaggagtacggcggcgccggcggcgacgtcctgtcctatgccatgtgcgtggaagagctggccaaggtttgcggcaccactgccgttatcgtctctgctcatacctccctgtgcgccgcccccatttttgagaacggcaccgaggagcagaagatgaagtatctgcctgacctgtgctccggccgcaagatcggcgctttcggtctgaccgagcccggcgccggcaccgacgcccagggtcagcagaccaccgccgtgctggatgagtccggcgagaactacatcctcaacggttccaagtgcttcatcaccaacggcaacgtggccgacaccttcgtgatcatcgccgtcaccggcaagaccaccgacaagcgcggccgcaccatgaaggagatctccgccttcattgtcgagaagaccgacaagggcttctcccagggcaagcacgagaagaagatgggcattcgcggcagctctacctgcgacctgatcttcgaggactgcgtgatccccaaggatcgtatgctgggcaagaagggcgagggcttcaagatcgccatgaagactctggacggcggccgtatcggtatcgcttctcaggctctgggcctgggcgagggcgccgttgaggaagccatcaagtataccaaggagcgcgtccagttcggcaagcgcatctcccagttccagaacacccagttccagctggctgatatgcacacccgcatgcaggccgctcagtacgtggtgtacgctgctgccatgaagaagcagaaccatgagccctattccatggatgccgctatggccaagctgtttgctgccgaggccgcttccgatgtgacccgccgcgccgtgcagctgttcggcggctatggctacacccgtgagtatcccgtggagcgcatgatgcgcgacgccaagatcaccgagatctacgagggcacttccgaggtccagcgcatggtcatctccagccacctgggcgttaagtaattgaggaggtaaaaggtaaaatgaaaattcttgttactgtgaagcaggttcccgatacctccggtaaggtggcagtgaaccccgacggcaccctggatcgtgcctccatgcagaccatcatcaaccccgacgacctgaacgccgtggaagccgccctgtccctgaaggaccagctgggctgcaaggtcatcgcgttcaccatgggcccccctcccgcagaaggtatgctgcgtgagctgatggccatgggcgtggacgagggcgtcctgattaccgcccgcgagttcggcggctccgacacctacgccacctcccagatcatcgccgccggtatcgacacctacggcgtggaagaggacgacatcatcctggccggccgtcaggccatcgacggcgataccgcccaggttggcccccagatcgccgagaagctgcacctgccccaggtgacctacgctggcgagatcaccaaggacggcaataccctgaccgtcaagcgcatgctggaggacggctatatgaccgtcaaggtcaagaccccctgcatgatcacctgcatcaaggagctgaatcagccccgttacctgtccgtgggcggcgctttcgaagcctacagcaagcccctggtcaccatgacctatgagactctgaaggatcatcccctgatcgacaagagcaccatcggcctggcgggttctcccaccaacattctgacctcctttacgcctccccagaagggcgccggcatgatgctcgagggcgccggtaaggagactaccgacaagctggccggcatcctggccgccaagcacatcatctgaggaaggagataagaaaatggcttttaatagtgctgataccgctgccttcaaaaacgtatgggttttctgcgagcagcgtcagggcgtgatgatgcccaccacctttgaactgatctccgagggccggaagctggccgacgagctgggcgttgagctgtgcggcattctgctgggcgacaacgtggacggcatcgccgctgagctgggcgagtacggcgcggacaaggtttatgtgtacaactcccccctgctgaaggacttcaccaccgacgcctataccaaggtgatcgtggaggccgttgaggagatcaagcccgaggtgctactgttcggcgcctccaacatcggccgtgatctggctccccgctgcgccgcccgtctgcacaccggtctgtgcgccgactgcacccacctggacatcgacctgcccaactataagaacttcctaaaggaagcctccactctgcccgaggaccgcatcaacaagctgggcaccgtgatgatcaaccgggagccccatcccgtggatcgcgacctgaagatgacccgtcccgctttcggcggtcacctgatggcctccatcatctgcccccgcttccgtcccgccatggccaccgttcgtcccggcgttatgaagaagcgcctgtgcaagaagaacgtggagatcctgcaccccgccttcgctctggaggcttccgacatccacaccgaggtggtggagaccgtgaaggccgccaagaagctggtggacctgatcggtgcggacttcatcgtgtccgtgggccgcggcatttccaaggacgtggaaggcggcatcaagctggccgaggagctggctgaggttctgggcggcgtcgtgggttcctcccgcgcctgcgtggacgccggctggatc

SEQ ID NO: 127 - DNA, 11486 bp, unidentified
  source 1..11486: mol_type = unassigned DNA
tcagccattgtaaacctccaaaattctctgttcaaatttttctctgcctactctgtcgattgtaaacttaaagcgttcgctcggctttgcgttttctgcaaagaagttaagagcggcatcacagatttccataagtttttctttattttcgataaacggaataattgtttttcccttgttgattgagtttccgaaaagtccgccgaatgaaacaatgtagccgtgaattgtgtcccacgcatctgtcgggcaagccttgaagcatctgccgcagtagttacactttgaattgtcaacggaaattttcccgtcctcaagagtgattgcaccctgacggcaggcctttacgcagactccgcaaccgatacaagcgtcctctttccatgaaaccttgattccgcccttgataccgacatcgttttcctcggctttaagacagttgttctgacagcctgttataccgaacttgaacttgtgcggaagttcctttgcaaaatatctgtcgtcaagctcctttgcaagagcgtatgtatcaatacaaccgctgggacagattgcctcaccctgacaggctgtaattgttcttactctaggaccgcaaacgcccggttcaacatcgccctcggcaagtgcgtccttaactgcctcaacatcatcaagctttacaaaaggaatttcaacactttgtcttgatgtgaggtgaacataaccgtcaccgtagttttccgaaacctcggcaattttcgcaagctgtttagctgtgaggttgccgcctacaactctgagcctgagcgaaaaattatttttctgtttttgacgcataaagccgccctttttaagcgtagcataatcaactgccatttctcttactcctccgattcattcacatttatactgtctacagcctgtttgaagtcagactttaaatcctcaatatcctcaatgccgacgctgattcttattgtatcatcaaacacgcctgcgtttcttttttgttcttctgttccgtgagcgtaaattgtgcttgacggatgaattacaagtgttcttgtgtcgcctatatttgttgcatttgttgcatattttaaattgttgataagcttaaacgctctttctttacttcctgccctgattgtgaggattgcaccgccttttcccttcaacagcttttgacaaaggctgtaataaggagaagcttcaagagccggatagttgacttcgattccgttttgtgtttcaaagaactttgcaagctcaagagcattgtaacaaagacgctccatacgaagtccgagtgtttcaagtccgacagagttcataaaagcattaaacggtgcaaggcaacagcctatgtttcgccagataccgtttctcagctttgcaacatatgcaagccgaccgaattttttgtactctgcaagacctttgtatctttccgtattccattcaaaattgccgctgtcaacgattattccgctgattgaatttccgccgccgttaatgtactttgacgaggaatgaacaacgatgtccgcaccgtgttcaaacggctgaataagatacggagttgccgttgtgctgtcgataatgagaggaacaccgtgtgaatgaacaagctctgatacagcgtcaagatcggcaatttcaagtccgggattgccgataagctcggcaaagactgcttttgttttttcatttatgagcggttcaatctcctcggctgtcaccttgttgacatatcgtgtaacaattccgaaaggctcaagatctccaaacaaatcaattgttccgccaaaaagacctgcgcttgcgattacttcgtcacctgattcaagaatgttcaggagtgccatcgtaacggctgccatacctgacgaacacgcaaccgcaccgacaccgttttcaatggaagtaattctgttctcaaaagatgttaccgtgggattgcctattcgagagtaggcgtagccgggagctctgttgttgaacaccttttcaagctgttcggcagagctgtgcgaaaatgcactgacctgataaatgggagttaaggttgagccaaaaaccttttcaccgttaaaacccttgtgaagtaatgcggtgttaaactccataatatcaccaaccccttaatttcatacaaccaacccttttgtgtaagaccgtcgtaagaatttgtctgacggcttcgattgatataggtagattatactccattaatcatagtatttcaataggtttaataagattttacctcttgcacaatttttctttaaaatttgccgtaattccattatttcctacaatgcatatttgtttagtaggtattgatttttaaattaaaaactgttaccattattatatactctttcagcaaacaaaacgcacggaaaggagatgctaaaattgaagatttcaacaaaggtggaattcggaatcatcgctgttattgacattgcgtcacactcactaaacggcaatgcggtaacaactcccgaaattgccaaacggcaaaatatatctaaaaagtatcttgaacagattctctcatcactcagctcggcaggacttgtgcgaggtcaaaagggttcaaacggcggttatgttattgcaaaaaaccttaaagagattacattcaaggatatcataaacgcacttgacgcaaatgttctgagcaatgtttattttaactctcggggcgatgatgatgttatgataagacttatcgacaacagtctttggtcgaagatgtcgtcatatcttcaggaatatgccgaaagcattacacttgcacagctttgcgatgagtatatcaaaaacaatgaaattgaacacaacattccgatgtactacatctgatagattaaaaacaaaaagccaccgatttttatgtcggtggcttttcttgtttttatcggattttatttaaagctttcaataacctgacaggttttttcaatgtcatcatccgtgtgtgcaaatgaaacaaacatcgcctcaaactgtgacggtgcggcatagattccgttttcaagcagatgattgtaatactcggcatatctctttgtgtcggctgtggttgccgtgtcatagtcaacaacctttttgtcggtaaaaaatgccgtcataatcgaacccacacggttcacattaagtcctgcgttcttcattgcattttcaatctttgcagacttgcgttcaagctcgggatatatcgaatctttatttttttcaagaattttaagcgttgcaatgcctgcacttaccgctaccggatttcccgaaagtgtgcctgcctgataaacagaaccgagaggagcaacacactccataatctcttttcgacctccgtaaaccgcaagcggcattccgccgccgacaatttttccgagggttgtaaggtcgggttttactccgtaaagcttttgagcaccgccgagtgaaagtctgaatcctgtaatcacttcatcaaaaataagaagtgaaccatgcttttcagtgatttcacgcaggaattttaaaaatccttttttgggcggaacaacacccatatttgcggcacaaggctcaacgattacacaggcaatttcatcaccgcagttatcaaaaagctgttgcacggattcttcatcgttatactttgcaaggagagttgtgtctgtgtagcctttcggcacacctgcgctgttcggaattgaatttgtcagaagtcccgaaccgccctttacaagcaagccgtcggaatggccgtggtaacagccctcgaattttacgattttatccctttttgtaaagcctcttgcggcacggattgcgctcataaccgcctctgtgcctgaatttacaagtcggagcatttcaattgacggcatatttttgcggataagctcggcaagttcaatttctccgctgtggcacgcaccgaatgtaagtccgttctgacaggcagaagtcacagccttgataacatcgggctgtttgtgaccgaggatgttcggtccccatgagcagatatagtcgataaactcgtttccgtcaacatcataaatttttgaaccctctgcacggtcgataaaaagcggagttcttccgaccgaacggcacgcacggacaggactgttcacaccgccgggcataaagtcaagcgcctgtgcgtatagcttttcgctttgagttgtattcataaaagcacttccctatttgtaaaattcgtcaatccattttgcaacatcaagtgcgtggtatgtgattatgatatccgcacccgccctcttgattgcaatcatattttcgcacacaattttcttttcgtcaatccagcctttttcggcagccgccttgaccattgcatattcaccgcttacattataggcaacaagcggaaggtcaaagcgttcgcttgcggcttttacgatatcgagatatgcaagtgcaggcttgaccataaccatatccgcaccctcgtcaatatcgtctgcaatttcacgcagagcctctttgccgtttgcgtaatccatctgatagctttttctgtcgccaaatttgggggcagattctgcggcgtcacggaatggcgaatagtagcctgaggcaaattttgcactgtatgacataatcggagtgttgataagtccgttttcgtcaagtgcgtttctgattgcagacactctgccgtccatcatatccgaaggagcgatgatatccgcacctgcttttgcaaggctgacagccattttagagaggagcggaagtgtttcgtcattgagaatttcgtgaccgcaaacaacaccgcaatgaccgtgacttgtgtattcacaaagacagacatcggcaataataaggagtgacggataatttttctttatgtatctgattgcgttctgagttacaccgttatcgtcataggctgatgttgcaagctcgtctttatgctttggaattccgaaaataagaagtcctgcaatgccgctgttttcaatttctttaagaatctcgtctgctctgtcaagcgaatattggtagacattcggcattgaatcaacaggctttttaatattttcaccctctgcaataaaaatcgggtaaataaaatcgcccttgtcaattcttgtttcacgaacaagactgcgaatctgctcgcctgctcttaatcttctgaatcttctcatatatttatccttctttcaaagttacttccttgattatagtttccaaaattccgtctgtgtccttcgtttttgcaatcctgaacgaatttacgccgtgactttcaagtgcctcggcggtgatttcacctatgcagacaacggaagttctgtcggaaataattgctccgccgtcaaaaaatgtgttcacacccgacgcactcgcaaaagtgataaagtcggtatcaacaacggaattatcctgttttttctcaagctgaatgtcataggttttgacatcgtcaaaatcaatgttgttatcagccaaaatccgagtgagttcgggcgaaccgttttcggcacgcagaatcaatactttttcaccgcttttcaccgtttttgcaagcaaaattccaagttcacgggttgtgtagacatttggaatacagtccgcaaaaattccgtacttttcaagtacagccgctgttcccgaaccaatcaccgcaaacttaatatttgcaaaactgcggatatcctttttcaacttacgcagtcggctcataaaaatttctgcaccgttcatacttgtaagcaccacataatcgtaaccgtcaataccgtttattgcattgtcaaaaacttcgttgtcatgatattcaatcacctttaaaaggtcatgtcttttgacctttgcacccgaaagcgtaagcattttgccgagcttgtcggagagctttctcgtacctgtaacagtaaccgaaacatttttcaaaggtcttgtaattgtgggagcaaagtcaaattttgcggtttcgccaaccactataacggcaggcggtacaacctctgcggatttaacattttcgcagattgtcgagagagttcccctcacggtctgattttttgcacaagcaccgtttgacacaactgcaacgggagtatcctccgatttaccgttctgaataagattttccacaatgtcggggaggtttctcaagcccataagaaagacaagcgttccgtcggtttcggcacatttctttatattttcgggcagggtgtcctgtgccgtatgtcccgtgattatatgaacacttcggctcagatttctgtgtgtaacagggattcccgcaagttcgggaacggcaattgaggaagaaattccgggtacaatgtcaaacggaatatcggcacttttgagggcttcaatctcctctccacctctgccaaacacgaacggatcgccgcctttaagacgaacaaccgttttgccctctctcgccttttcaacaaggatttcgttaatattttcctgcttttcgctgtgtctgcccgaacgctttccaacgcagattttttcagccgtttcgggtgcaaaaccgagcaatgacacatctataaggctgtcgtaaacaagcacatcgcagtgtctgatatactccgcaccacgcattgttatcaggtcaaaatcgccgcatcccgcaccgacaatatacactcttccgttactcaatttcgctcaccagcctttttgcaagtttgattctgtttgaaatttcatctgttccgctgactgtttttttacagtcggcagacagagaaagcgttattttatcgttttcaacctttgaaattgcaccaacaggagttgaacaatcggcattgaggctgagcagaacctgtctttcggtttcaaacgaaagcattgtatttttgtcgctgatttcagcgagcattttggaaacctcgctgttttttctgctttcaatcgcaactattccctgacacggtgcagggagaaattcatcggcatcaaacgaagttaccgtgtaatcctcaccgttgtaaaggtcaagtctttcaagccctgcctttgcaagcacaagagcatcgtactcaccgttcaacagctttttaagtcgggtgtcaacattgccccttatatccttgaattttgcattaggatagattttctccgcaaaaagctttcgccttaaactgcctgttccgatgacaaagccgtccttaatttcaaaatcattgcgtgtaacaaaaacatcgccatagctgccccttggcaacacggcggaaatttcaagtccgtctgcaatttttgtcggcaagtcctttgcgctgtgaacggcaacatctgtttctccgctcaaaagtgacatttcaagctccttgatgaacacaccttttccgcctaaagctgcaagcggtttgtcaagggttttgtcgcctgttgtcgaaatgtaacccgtttcaattttaacattcggaaaacggtttttcagcgtttttattaacatttcggtttgtgcaagggcaagcctgctttttcgtgttccgatttttatcgtcattgttcgtattcctcaatcaaattttcaacagttttttcatcgggttcaagtcccgaaaggcaaagcgaaagaagctgttcaaaaatcttccttctgtcatcttccctttcaaccttctccttaattatcgggcgatatttccacaaaacctcggttgtgttttcgttcatactttcaaggattcccacaaaaagctctttaagatattttgcgtaaatcggacttttgcccgaagttgtaattcccgccgttatgccgtttttgcttgcaattgcaggaaaaataaatccgcatttttccttatcgtcaactgtgttgacaagaatatttttctcattgcaaagctgaaaaattctgccgttgagcgtttcatcatcggttgcgctgataacacaaaacgcaccgtcaaggtcgctgtcacaaaatctgcggtcaatgattttcacattcaaagccttgatttcatcgcagattttcggggcaacaacggttatgtccggcgagaacggcgtcagcttttcaatctttctgagtgcaaccgtaccgccgccgactacgagtatttttttgttttcaatgtcaatataaaacgggaaatatgccattagttattctctccgcactttctgtagatttcaagaattcttgcaaattcttctgccgaaacatcggatttcagcttataaatgaatttttccgaaaaatctgacggcattgcgttttttacggactgcatacacggcagaaattcgtgaaaggcaaggtcttttttgagaacttcaatttcctcaaaaattattacttttgcactttcaacactgtcgagtttgagagcattgttctcgtttgcaagctgttttatgcagtcaatgttaatgagccttacaccgcttattttgtggatattttcgtcaatgtcgggcggtacggcaaggtcaataaacagccttgatttttcggtttttatattgttttttaaatcataatatgtaaccgtgtaatgcggtccgcttgtggcactgattacgcagtctgcaaagtcaaacgctttgtatctttcgtcataatcaatcacattagcacccgtattttcaaaaacagtttctgctttgtgctttcgtgaagtcacggtaacgcttatacctttgtgcgacaaaagatttttcacaacagttgaaccgaccttgcctgttgcaccgattacaaggacattcagctcaccgtctttgaattttgccgcctcgtttgacgctagagttgcaacggaaaccgatgtttttgaaatggcggtttcggtcttgattttttttgcacaggcaacagccgcctgaacgcacatattaagctcatatgcaaccgtgtcgttgtcctttgcaaatgcgtaggctcgctttagctgaccgagtatttcatcttcaccgataaccattgattcaattccgcctgccaccctgaaaagatggagcaaagccctgtcaccgtagaaaagacagatgtacttttttagttcgtcaaaatcaattcccgaaaaatccgaaagaacggtttcaaccgttttcacagatgattcgtctccgcaaaaataaacctcggttctgttgcaggtgcagagaatcaaacactcgctgatattttcagaataataaagttcgtcaagaaatgtctttttttgctcatcgggaaaggcaagcttctttctcacaaccacatttgaagttttgtgacttacgctcaggcagtacataaaaatttcgctccgttacaaataaaatccgacagtaaaatacacttttaaagttattttattactgccgacagctattgtcaattaaagttagtcagttattttaccactaaacctatctgtttggtatgttttgattatactacattcaccattctatgtcaataaatttcgggttttgcttgacaaaaacagttattacaatataaactatacaaagatacctcccgtcagcaaacagcgggagttttattccgatgtaaatacttattgtaccgataggaatactaaatgatttgaatatgtattaaggagcgtttttatgcttaatcagttttcaagaacacagcttttgattggcaaagaagctatggacaagctttcaaaaacaagagttgcaattttcggaatcggcggtgtaggcggatacacggcggaggctcttgcaaggagcggagtcggcgggcttgaccttattgacgatgacaaggtgtgccttacaaacatcaatcgccagatttttgcaacaagaaaaacagtaggcaaatacaaggttgatgttgcagaggaaaggctcaaggacatcaatcccgacataatcatcaacaaacaccagaccttctacactcccgaaacctcggaaaaattcgacttttcaaaatacgactatgtagttgacgcaattgacacggtaacaggcaaaattgagcttgttatgcaagccgacaaagccaagacgcctatcatctgttcaatgggagcaggtaacaagcttgatcctacagcgtttgaggttgccgacatttacaaaacctcggtctgtcctcttgcaagggttatgagacacgaactcaaaaagagaggtatcaaaaagctgaaggttgtttattcaaaggaaaagcctatcacacccgttgacgatatgacaataagctgtaaaacaaattgcatatgccctcccgggactgaaagaaaatgcacccaacgcagacaggttcccggcagtaccgcatttgttccgtcggttgcaggtcttatcatagccggcgaagttatcaaggacttgattaagtaaatataatttttaacaaagcaaagcaccgagagaaattaccctcggtgctttgcttgtttttataggattttttacagttgatatcgtgattaaacagattagatgataaccgattcttcctgaagtgatttgttacggagaatctgaacctcatcgcctttggtaatgaaaagccgataaagaaatacattgaccttttcccctacggtaatcggagtttcgtcaagtcctctgtacgcataaaccgtgcctccgtcacattttacggcaatttcgatattgtcgcctctgaacgaagtctttataacctcgccgacggatacagacgctttttgtgcggttgtttcgctgagctttgtcacctttacaaattcgggacggataactgcacggtcaacattatcgacaacatcaaaggtcttgaactttgtataatcgtcaagcgtagtagtctgaccgaaaaatgatgcggaaaatgcggtttcgggatgctgataaatgtcaatcggcgagcctatttgctcaattctgcccttgttcgtaattatgatttcatcggcaacctcaatagcctcgctctgatcgtgggttacaaatatacttgtaacgccgagtctttcaatcatatccttaagccatgagcgaagctcctgcctaacctttgcgtcaattgcggcaaatggttcgtcaagcagaagaagattcgggtttggcgcaagcgctcttgcaaaggcaacacgctgtttttgaccgcccgaaagctggcttggataacgcttttcaagtccttcaagaccgataagctttacaagctcgtttactctttccttgataaatttcttgctctttttctgaattttcagaccgaaagcaatgttatcaaaaactgtcatatatctgaaaagagcgtagttttggaatacaaagcctatgcctcttttgcttgcgggaatatcgttgacaacctttccgtcaattacaatttcgccgctgtcgggattttcaagtcctgcaatcatacgaagaattgttgtttttccgctgcccgaaggaccgagaagtccgataagcctgcccttttcaataccaaagtttacattgtcggatgccttgtagtcaccgaaagttttatttatatttttaagctcaacatacat

SEQ ID NO: 128 - DNA, 11906 bp, unidentified
  source 1..11906: mol_type = unassigned DNA
atgaaaaattcgcggcgcatcttggcgcattcttatctggaaatagtataacgcttccatcagcaaatcgttttccgcgtccgttttcaccgccaggcgcagataattcgcgggcaagccgaacgaatcgcacgtccgcaccaaaatgcgctgcgcccgcaggtgctgcaccgttttcgtcatatcgtgcccgaaatcagccagcaggaacggtacgcgccccgctgtcacacgcacgcccatctcctgcaagcaccgcgcgaaccgctccgcccgcgcctgattcgcctgtgcatccgccgcaatttccgcctgatgacggggcagctccgccgcaaccgccgacgccagcacgttcagcgaccatgtgactgcccgctcctgcaagcgtgcaatctgttccggcgcagcgcagatgtaccccagccgcacgcccggaatgcacagaatcttcgtcaacgacccgaccaccgtcaaaccatcctgcacatggtggcgaaccgtcgcatccgggcaatagtcgatgaacgcctcatccacaatcagctcgccgccgctgttccgcacgtcccgatgcatccgcagcacgtcattcggcgaaagcagcgtgcctgtcggattgttcggattacacacaacgaccgtgtcatccgcctgaatcgcctgattcgccgcaacccgccgcccatgcgccttcgcccgctccgcatattccccgaacgtcggctgctgcacatgcaccgcgccgcgccgaacgccgagcgtcaggtcaatcgccgccgcgccgcccgccgtcggcagcacgcagctttcgtccacgccgagatacaacgccagccccgcacgcgccgcccgcatcgcgcggtcaggataatagcacgcctgcgaaagcgccgcgcgcatggtgtccatcacccacgcgggcgttccctctggtcgcagattcgcggaaaagtccagccaatccgctggctgaccttcccaaacattgccgccatgcctcaatgccgcgtcctcctgaatcagcagaaataccgagaatgattatagcaaaattacgggggaatttcaacagcgggtgggcaggatgatgaatccgcagttatagaatagaaagaaaactgacaggcatacactccataagtacaattgtacttctttcgcttttgccaattgtaaataattgcgccaaagaattgactttttcgtgaaaaggcgtataatcatggaaggaaggggtggaaattcatgagaacgacgaagctaatggcgggtgtgctgacgctgctggtgctggtcggcggcggctgccgagacggtgcaatcctccgaaggcacggtgtataccctgccggcgaatgtctcccgcatcgaggagtacgcgttttacggcgacggggaactgcgggaaatccgcattccggagggcgtgacggaaatcggagattatgcctttgcaaactgctggtatctgacggaaatcacgattccggagagcgtgaccaagattggcgcacatgcctttgacagctgcgtgagcttgaaaacggtgcagctgtccgacaacatcaccgaaatgggggaaagcgctttttatcgctgcctcagcctgacggaaatcaccctgcccgcgtcgctgacgggcatttcggcgcatatgttcgagaactgcgaaaaactggtgacggtcacggtgccggaaggactgctggaaatcggtgattctgcctttgcaggctgcaagaagctggaaaactgccctctgccgccgaacctgacgcgcgtcggcagctacgcgttcgacaagtgtacgctctggaacgccgagctgctgccggatacgttgacggaaatcggcgagtacgccttccgccagtgcaagaaactgacagaagtgacgattggcgaaaagctgctgaatgtcggcgagggtgcgttctgcgactgcgacggcatcaagaaagtggactggcaggcgaaagtgacgcgcattcccgaccgcgtgttccaatcctgctactatattgaaaccgtgaagctgccggaaacagtgacggaaatcggcgagtactcgttctattcctgcggctatttgacggacattggcacgtttgagcggatgaagcgcatcggcgcttgcgcgttttcaaactgcagagcactggtgaatatcggcacgctggacgcgatagaggaaatcggcggcggcgcatttatgctcgaccaaaagttggtactttcgctggatggcttgcagcacctgcgcattatcggcggctacgcgttcggcggctgcccgaaagtgaccggactgcgtgatttgccgatgctggaagaaatcggcgcgagcgcactggacagcgcgaacatcccggaagttgcgaatctgccgcgcttgcggaggattggcgcatccggtctgtccaatcggtcgctggtgacggtgggcgacctgcccagcttggagtatatcggcgactcagcgttccggaatgcaacttcgctgaccacgttcggcgcagcaccgaatgtgacgtacattggcgcgaatgcctttgaagaatgccgcaaactggagacgcttggtttggatggtgttgcggcagaaatcggaagggaagcgttcatcgcctgcacttcgctgaagtcgcttgatttgtcgaatgtcaccagcattggggagaaggcgttcagctactgcggcacgctggaaacggtggtcagcctcgaatccatcaccagccttggcaagaatgcgtttgaggaatgcagatcgctggtgacggtcggcaaaatcggcaatctgacgcggctgccaaacgaagtatttagggaatgcaaagcccttgcaaatgtcaccctgccggatacgatggagacgattggcacagcggcgttcaagcattgctatggtctgcctgaaattgtgattccagacagcgtgacgaccatcgaggaagaagcgtttagcggctgcacctcgctgcaggaaatcattgtgccagattctgtggtaaaaatgggcaatcatgtgtttggcggatgccgaagcgcaacgcggattgtattcccgaaatacctcacgtacctgcccggctatggtgtgagcttctgcaactatatggtggaatttgtattcccagagaacgtgaaatctatcagcgattacttcttctacggctgcatttcactgaaagaaatcgtgattccggatacggtgactaccattgatttccgtgctttctgggattgcacttccttgacgcgcatcacgattccggcttcggtcacgaaaattgattcgacagcgtttgacggctgcaagaaggacaaactggtgtgggtggtcacgcccggttcgtatgcggaaacgtacgccaagaagaattattaccattacacatacgcgaagtaaaccctgttgggagattgccctgcgcagtctcccgtttttttgcgtccagcattccataacattacccaacattcgccaaaataccccttgatttttgcagtgctgcgttgtacaataatttacaggggcgcaaccctgcccccaaagctgctgcaatgcaaaaggagtcgccatgggcaattcgtattcgttgttcctgcgtcagtcgtatctcgacgcgtgggaggactatcgccgctcgctgcacagggctgatttcccggtctgggattatatcatactcaccgcgtccaatgaggcgcaggcgaatgcgtatcgccagcagattgccattcgccgggcgaaaaacctcctgcctgagcggacgcactatgccgttctgcccgacccggacgggctgcgcgtgggcagcggcggcgcgacgctcaatgcgcttcgttatgtctgcacgcaggaaggcacatttgcgggcaagcgcattctgtgcatccattcaggcggggacagcaagcgcgtgccgcagtacagcgcgtgcggcaagctgttttcgcctgtcccgcgtgagctgcccaacggcaggcgctcgacgctgtttgacgagttcatcattggcatgagcggcgtgccatcgcggattcgggacgggatgcttgtgctgtcgggagatgtgctgctgctattcaatccgctgcagattgatgcgcccgcatccggcgcggcggcgatttccttcaaagaggatgtggaaacgggcaagaaccatggcgtgttccagatggatgaacagggtaacgttggcgagttcctgcataaacagacggtggagacgctgacgagccgaggggcggtcaatgcgcagggcaaggtggatattgacaccggcgcggtgctgttcagcgcggatttgctggcggatttgtatacgctggtggatacgcccgcaaagtttgcggcttttgtgaatgaccgcgcgcggctgtccttctatggcgatttcctctatccgctggcaagccgttcgacattggagcagttctaccgcgaaaagccggatggctcgttcactgaggagctgcacgcctgccgcaccgctgtctggcaggtgctgcggaagtatcggatgcgtctgctgcggctggcgcccgcgtcgttcattcactttggcacgacgcacgaactgcgcgcgctgatgacagacggcgtgtcggcgtacagcttcttggactggaagaagtgtgtgtccggctgctgctcatcggcgaattatgcgctgaataacgcgatggtggaggaggactgctgcatccatgacgattgctatctggaggacagccatgtgatgggcggcgcgattatcggcagcggtacggtgctttcgcatgttacagtcagcggaaagaacattccggcgaatgtcgtcctgcacagcctgaagctggcggacgggcactttgtgacgcggatttacggcgtggcggacaatccgaaggaaggtacgttcttgggcggctcaatggcggcgttcgggaacgtgtgggatggggatgaccattcgctgtggcaggcgaaaatctacccagtctgcgattctatggcggaatcggtggatgcggcgctgaatgtctacgcgctggcaatgggcgcggggaattatgatgcgtgggcatcggcggagcgcgtcagcctgtgcagctcgttcaacagcgcggacacggcggcgattctggaatgggagacgcacctgcgcaaagccgtgaaggtcgagcgcttcttgtctgtgattcgccgcggcggcacaatcgaggaagcgaagaaaatttttcaggatgctgccatcagcgcctatcagcgccgcctgattgcggaaaaggcggcatcggcagacgtgttcacacggatgcgaatcttctactgcctcggtaaagtactgggtgattcgcaggaaggggaggcgtacatcaagcgggcttttgaggagattcagcgcatggtgcttgcgggagcggcagcgcacggcacggggctttgcgcacatcatcagccagtggaagaagaagcagcggtgcgtctgccgctgcgggtcaactggggcggcggctggagcgatacgccgccgtactgcaacgaaaagggcggaacggtgctcaatgccgcgattctgctgggcggcgagtatcccgtggaggtgcatgtgcgccgtctgccgaagccgatggtcgtgctggaaagcgcggatatgggcgcgcatggggaattcacggcaatttcggacttgcaggagtgccacaatccctacgacccgtttgtgctgcacaaggcagcgctgattgcctgcggcgtgattccgcgcgagggcggcgaattgacggatattacggcgaaaatcggcggactgtacgtctctacgcagatgcacggcgtgccgaagggtagcggtctgggcacgagcagcattcttgcaggcgcgtgcgtcaaagcgcttttccagtatttcggcgtggcgcacacggaggacgatttgtatgagcacgccatgtgcgtcgagcagattatgtccaccggcggaggctggcaggatcaggttggcggcatgacgccgggactgaagctcatcaccgcgcccgcgggcattcagcagaaattgaacgtccgccatatcgctctgtcggaggacaccaaggcggaactgaacgcgcgtttcaccctgatttataccggccagcgccgccttgcgcggaatctcctgcgcgatgtggtgggccgctacatcagcaatgcgccggacagcctgtacgcgctggaggaaattcagcgaatcgccgtgatgatggcgtttgaactggagcgcgggcatgtggatgacttcgcgaagctgctgaatcgccactgggagctttccaagacgattgacgcgggcagcaccaacacctgcatagaccagatttttcttgcgattgacgacctgattgacgggcgcatgatttgcggcgcgggaggcggcggattcctgcaggtgctgctcaagcacggcgtgacgagggagcagctgaacgcgcgcctgcatgatacatttcaggactgcggcgtggacgtgtgggactgcacattggtttaaggaggtacgatcatgctgaagggtatttccccgctgatttcgccggaactgctgaaagtgctgtgcgagatggggcatggggacgagattgtgctggcggacgcgaatttccccgcagaaagcatggggcagcgcgtcgttcgtgcggatggcatcggcgcgccggaactgctgcgcgcgattctgccgctgttcccgctggatcaatatgatgaaagcaactttgtgctgatgtcggttgtgccgggtgacccgacagtcccggtgatttgggacgaataccgcgcgacgctgacggcttatgagccggacgcgaaaatccagacaatcgaccgctttgcctactacgagcgcgcgaaaaaagcgtactgcattgtcgcgacaggcgaaagcgcacagtacgcaaacatcctgctgaaaaagggtgtcattcggcagcattgcaaatgatatgaaacctaagattatactgacaatagtttctatacccccttactttttgaaagcaaattctttataatagcagtgtatctattttcaagaatagctgatgaaaagaggaaatttcaagacgatggcgaaaaaggcgctgattaccggcatcaccggtcaggatggttcctatttggcggagttcctgctcgaaaaagactatgaggtgcatggtattgtccgccgtgcgtccatttccaacacggcgcgcattgaccacctgattgagaagaaggcaattcacctgcatgacggcgacttgtcggattcttccggcctgattcggctggtgggcgaaatcaagcccgacgaaatctacaatctggcggcgcagagtcatgtgcaagtgtctttcgacgcgccggaatattcgggcgacgtggatgccttaggtgttctgcgcgtgctggaagcggttcgcgtgtgcgggctgacgaaaagctgcaaggtgtatcaggcttctacctccgaactgtacggcaaggtggaggaggttccgcagcgcgaaactacgccgttccatccgtacagcccctacgcggtggcgaagcagtacggcttctggatggtgaaggagtaccgcgacgcgtatggcatgttcgcggtcaacggtattctgttcaatcacgaatccgagcgccgcggtgagaatttcgtgacgcgcaagattaccttggcggcgggccgcattgccgagggaatgcaggatcatctggagctgggcaatatggactctctgcgtgactggggctatgcgaaagactatgtggagtgcatgtggctgattatgcagcaggagaagccggatgatttcgtcattgcgacgggtgtgcagcataccgtccgcgatttcaccgagaaggcgttcgcggcgaatggcatcagcatccgctgggaaggcaagggcatcgacgaaaggggctatgacgcggcgaacggcaagatgctggtgtgcgtgaatccgcagtggttccgcccgacggacgtagacaacctctggggcgatccgacgaaggccaagacaatgctgggctggaatccgcaaaagaccagttacgagcagctggtggagatcatggcgaagcacgaccgcatgttggcgaagcgcgaaaaggcgatgcggacggcgctgtaatttgggcttgaagagcagaaagagggacagccatgatgaaaaaggatgcaaagatttacgtcgcgggtcatcgcggcatggtgggttccgccatcgtgcgagaattggaacgtcagggctatacaaatattatcacccgcacccacaaggaactggatttgacccggcaggaggcggtcgaggcgttctttgcgcaggaaaagccggcgtatgtatttcttgccgcggcaaaggtgggcggcatcgttgcgaaccagaacgcgctggcggatttcatgtatgataacatggtgctggaaatgaatgtcatccatgcggcgtggcagaatggctgcaagaaactggagtttctcggctcatcctgcatctatccgcggatggcgccccagccgatgaaggaaagctgcctgctgacctccgaactggaaaagacgaacgaggcgtatgcgctggcgaaaatcagcggtctgaagtactgcgagttccttaatcggcagtatggcacggattatatctccgtcatgccgacgaacctctatggcccgaacgacaactatcatccgacgcacagccacgttcttccggcgctgattcgccgcttccacgaagcgaaaatcaacggcgcggaaagcgtgacttgctggggtgacggcagcccgctccgcgagttcctgtatgtggacgatttggcaaacctttgcgtgttcctgatgaacaactactccggcagcgagacggtgaacgccggcacgggcaaggaactgaccatcaaggaactgatcgaacttgtggcgaaggttgtgggttacaagggtgaaatcaagtgggatcccaccaagcccaacggtacgccgcgcaagctgcttgatgtttccaaggcgacgaacctcggctggacgtatcggacagagctggaggacggcatccgccttgcgtatgaggactttctgaacaaccccatgcgcgctgaacgttaaggcactaccgcacaattcgtcggcagcgctggcgatgccttttctgccatctgcttcttgcagaaatctcgatttacctccagtaaaccttcgatttctgcaatcgcatctgacaaaaaatgcattcgccatcgcaccaactcatttgtgcggtattgccttaaggcaacaccgcacaactcggcgtcaccttaatccgcgaaggaagcaacgggggctgcatggcaaaaagtgcagccctcattctgttttggaggagaaacaaacgatgaacattatcctgctttccggcggctccggcaagcgcttgtggccgctgtccaacgatattcgctcaaagcagtttatcaagattttcaagaaggaagatggcgcttatgagtcgatgctgcagcgcgtctatcgccagattaagcaggtggatactgacgcaaccgtgaccattgcgaccagcaagacgcaggtgtctgctatccacaaccagcttggtgagcatgtcggtgtgagcatcgagccatgccgccgcgacacgtttcctgccattgcgctggcaacggcgtatctggtggatgtgctgcatattgacccgtcggaatcggtcgtcgtttgcccggttgacccgtatgtggaggacgcttacttcgaggcgctcaaggaattatcggcgcaggcggacaagggcgaggcgaacctcattctcatgggcattgagccgacgtatcccagcgaaaagtacggctacattattccacagaacggcgaacatatatcgtcggtagataccttcaaggaaaagccgacggcggatgtggcggcggagtatattgcccgcggcgcactgtggaacggcggcgtgttcgcttacaaactgtcctacatgataaacaaggcgcacgagctgatagactttatcgactatcaggatttgttcagcaagtacgctgcaatcaaaaagatttcttttgactatgccgttgcagagcatgaaaaacagattcaggttgtgcgttttgcgggcatgtggaaagatctcggcacatggaacaccctgaccgaagccatggaagaaacaatcatcggcaagggtgaactaaacgacaaatgcaggggtgtgcatatcatcaacgagctggatgtgccggtgctggcgatggggctgcatgatgtggtgattagcgcatcagcggagggaattctggtatccgacaaggagcaaagttcctacatcaagccattcgtggacaagtacgagcagcagattatgttcgcggagaagtcgtggggcagcttccgcgtagtggatgtggagatgaactcgctgaccatcaaggtgacgctgaaccccggtcacaacatgaattaccacagtcatcagtaccgcgacgaggtgtgggtggtgatttccggcgcgggcagaacgattgtcgagggggtagaacgtccggtcaagacgggagatgtcataacgatgacagcgggtcagcgccacacggtcattgcagacacggagctgaagatgatagaggtgcagctgggcaaggatatcagcgtccatgacaagaaaaagttcactttgtgattgacaggacgcataaattggtatatgctgtctctcgaaacggaagcaatgccaaaactactggaggcggaggatgccggatgagtaaagtgcttctgattacgaatatccctgcgccgtatcgggtggatttgttctactatatgcagacgcatcagcagacgcatgagtttttcgtcatttacacgaatcgcaatgaggacaaccgccagtggacgattgacgagcgcaaactcctgcaatcgacgattctggaatctaaaatcatcaagcgcaagggcgaaggtgatgtgcactacctgcatattccgcagcacctgacgagggaaatcacgcgcatcaacccggatgtggtgattgcgtgggagtacaacccgtccgcgctgaaagcattgctctggtgcaagcgccacggcaggaagttcatccacctcacggacggcacgctgcgttcggagcggaacatcgggcgcgtgcagaaactcatgcggtatatcatcatccgccacgccgacgcgtgcattgccagcagcaccaaagcgaaggaaaagctgctgcactggggcgcgccggagcggaaaatcttccttagcctgctgacggtggatatttcccgcttccgctatgccgaaaagcacgaaaatcagcatacgctgctgtttgtgggcagaattatccccctgaaagggctggatttgctcctgcgcgcgctgccgaaagtgcatcagccgtttgaactgctgattgtcggcgacggcgaggtggaggagaaggcgaaattgatggcgatggcggaagaaacgcacgttgcgcagcacattcactggctgggattccagtctggcgagccgctggcggatgcctatcgccgggcgagcgtgtttgttctgccgacccgcgaggactgcttcggacttgtgctgctggaagcgctctgctccggtacgccgattgtcgcgtcgaagtatgccgacggcgcgtatgacaccgtgcatccgggcgaaaacgggctgattgttgacccggaggatgccgacgcgctggcggaagccatcgacagcattctgggcagcgaggaaattcagcggcgctattcgcagaactgccgccagtatattccgcaattcgagtttgaggcggtcatgcaggggtatctgcaggcgattgcgtccgtcacatcaggcaacaaataa

SEQ ID NO: 129 - DNA, 7637 bp, unidentified
  source 1..7637: mol_type = unassigned DNA
  misc_difference 3646: note = a, c, g, or t
  misc_difference 3647: note = a, c, g, or t
  misc_difference 3648: note = a, c, g, or t
  misc_difference 3649: note = a, c, g, or t
  misc_difference 3650: note = a, c, g, or t
  misc_difference 3651: note = a, c, g, or t
  misc_difference 3652: note = a, c, g, or t
  misc_difference 3653: note = a, c, g, or t
  misc_difference 3654: note = a, c, g, or t
  misc_difference 3655: note = a, c, g, or t
atgaagaaatcatatgcagtgatcacaggggcaagctccggaatcggtatggcgtttgcacggcagcttgcagcagaggggtatcgtctggtgctggttgcacgcagagaggaccggctacaggaactggcgcaggaattacaaaagaagggaaccgagagcattgtgatatcggcagatttgtcacaaaaagaagcctgttatcacctgatgcagcagatcgagaagctgccagtcgggatattgattaacgatgcgggattcggtgactgtggcagctttctggagacggacgcagataaggaaatgcagatgattgatgtaaatgttaaggctatgcatcttcttatgaagctgatgcttcgccgtatggagaagcaggagggcggttacatcttaaatgtggcttcctcggcgggacttcttccggcagggccttatatggccacctattatgcgaccaaagcttatatagccagcctgacacgtgccgtggcactcgaactgaaacagagaggcagccgcgtgtatgtgggggcattatgtcccggaccggtgaatacagaatttaatgccgttgcaaatgtagagtttgcactggcaggaattactccggaatattgtgttagatatgctttaaagcagatgaaaaggcgcaaagtagtgattgttcctacgttgacgctaaaagccgtgacaacctgtggaagatttataccacaaaaagtgctgattgcaattaccgcacatcagcagaaaaaaaagctcagagcagaggatatatcataagatggaagaaattaaaatcggttcccatgtgggaatggcaggaaaagagatgtttttagcgtccgtaaaggaggcagaaagctacggagcaaatgtgttgatgctctatacgggtgcaccacagaatacccgcagaaaagaaatcaaagatctgaatattgaggcaggatgggcctatgcaaaacaggccggaatccgggagattgtggttcatgcgccttatatcatcaatctggcaaataccgtaaagccggagacatttgaactggctgtacagtttctggaaaaggagatccggcgcacggctgctatgcgaagtcatatcctggtgttacatccggggtccgcgctggatgcgggtgcagaggccggaattgcacagactgtccgcgggctgaatatggtgctggatgagaacgaggatgaggtatttattgctctggaaacgatggcaggaaagggcagtgagattggaagaacctttgaagaaattaaggcaatctatgatggagtgaacaaaaaggagcggttgagagtctgttttgatacctgtcatgtaaacgatgccgggtatgatctggtgcatgattacgatggtgtttttaaacattttgatcaggtgatcggactcgaccagattgcggtctttcatatcaatgacagtttaaatccacttggggcacacaaagaccgtcatgccaatatcgggcagggaaccattggatttgagacgttgcatcgtctggttcatgatccacgttttatggaaattccaaagattttggaaacgccatggctttgtgcagagggggagacaaaaaagacgattcctccatataaagaagaaattcaacagcttcttgcaaaataatgacaaaaaggagaatggttatggaaacaaaacaaccggggatttccggctattggttaaagctgattgctgtaatttccatgctcattgatcacacgtcagccgttattttagaacagattccgggactggaaaatcccgcatttttgatgcgcatcattggaagactggcgtttccgatttactgttttcttctggtagaaggattttaccatacacgcagcagggcaaaatatgcggggaggctttttttgtttgccctgatttccgaggttccgtttgacctggcattcagcaggagaatgtgggatttttccagcaacaatgtcttttttactttgctgttcggacttttggtgatctggggtgttgaagggataaaacagaagtttgtggaggaagtttacgggaataaggccgcagtcatccgcctgattcttaccattgtgacagttgcagccgggggatttctggcacttcttttccgtacagattacgatttgtcgggaattgtgacaatttttgcaatttacatgttttatccgaagaaagtgaagggaatgggtatcggtgtttttgttttaaccctgctggcaagtatcattgaagcggcagcatttctggatatgataccggtttatttttacaatggaaccaggggaaaacagatgaaatatttcttttatatattctatccggcacacctgtttcttcttgccatgatcgcacgggcaatgggactttgggcttaatattttaagaagatgttacgattcttatgaaattcttatctttttcagatacagcttgcgttcctgaaaaagcgggagtacaatgcagacgaaatgaaagacagataggaatggaggtcttggatgatgagacaaaaatcttggaatcagtttaaaaaaacaatggctgcctcgacactggcaggagcgatcacttttacagggtgtgcggtgatgccttcggttacagcttttgcagatacaacagaacagaccggtcaggtatcgtatgataatgaggtgatgccgatccacacggacgtgaagacggaggcaaaaccgttgatgaagggtacgtcatgtacggtttcggatggaaagaacctgtattatgcgtttgaaatgatgggtgtgcgtatgggcattatgaaatacaacaccaaaacaggcaaaaagagtgaggtatattcctacaaaatagggaaaaacaaaaagggaagcaatggtttttcccaattatctgtggataagaaatatatttatgcaacctgggaccgttactatggaaccgatgcaacaaaagaatatatttaccggatcgcaaaagacgggaaatccgcaaagaaacttgcgctcggacgtgatccacagcttgtagatggacggatttattatctggcactgaaaagtaaaagtgaagatggcatgaattattcggaagataccggaaccgttatgagtatgaagacggacggaacggataaaaagaaagttgcacagattgtaaacagcggagatgcttatcggtattccctgtttcagagtgagggaaagatttactataccaaggaaaacgagaacaagacattttatgatctggagggaaacagttatcagagagaggcctttgcggttaaggatgaaaattatctgagtgtttcgctggaagccgtcaatgatggaacgtatacctaccgtacgacaggaaaggatcggtacatgcagacgaaactctaccggacagataacaggacgggaaagaaaaaccttgtggcatcctttaaacttggcattgaaaaatactcggtttgtggaaattatgtattcgtggaagcaaatgttccgtacaagggagctgatgtgactgagaaacttgcagtttactgctataaggcagatggcagcagcaaagtaaagcttgcttcctggtttccggcagaataaaatccgggtaacaatcgaaaaaataaaagannnnnnnnnncgactgcggtgcttcttttattctggggatttatttatccagatcttttttatctacattctgcagcatcattgcacgaactttcagaggaagtccgaacagtgtgatgaatccgtctgcatcgtgatgatcgtactgatcaccggttgtgaaacttgccagagactcactgtagagagagtatggagaagttgtgccggctttgatgatgtttcctttgtagagcttgaattttacttcaccggtgacatacttctgggtagaagtaacaaatgcctggattgcttcgcgaagaggagtgaaccattttccttcgtatacaacattggcaagacggttgcccatctctttctttgcagataaggtatcgcggtcgagaaccagttcttccagctggtcatgtgcttccataaggattgttccgccaggagtctcatatacaccacgggatttcataccaacgacacggttttctacgatatcgatgatgccgacaccgtgctttccaccgagacggtttaattcacggatgatatcggaaactttcatttcttttccgtttaccgtctttggaacacccttttcaaaggtcatggttacatattcgccttcgtccggagctttctcaggggaaacaccaagaaccagaagatgatcataatttggctcgtttgcaggattctccagctcaagtccttcatggctgatatgccataagttacggtcacggctgtaactctggtctgtgccgaatggaagatcgattccgtgtgctttgcagtatgcgatctctgcctcacgggaatccatctgccacttgtcatcacgccaaggagcaatgattttgatatccggagcaagtgctttgataccaagctcgaaacggatctggtcatttccttttccggtagcaccgtggcagattgcaacagcgttttcttttctggcgatctctaccagtttctttgcgataccaggacgtgccatggcagtacctaataagtatttgtgctcatatacagcaccagcctgtacacaaggtacgatgtaatcgtcacagaactcatctgtgatatcttcgatatataatttagaagcgccggataatttggctctttcttccagtccgtctaattcttcgccctgtccgcagttgatacagcagcagacaacctcataaccataagtctcctttaaccaagggataatagcggtagtatcgagtccgccggagtaagctaaaacaactttttctttcataagattgtatcctttctttctatatggaattgtacgctctcgtacgactaaccctactatacatcaatccaaatgaaaacacaagtgaaaaaatatacataaaattgcataaatatacataaatttgtgaatatttgctatttacggatggaaaaagatggactattatagggtagaatcatatttttaaaagaaagaaaaggtaagaaacatggtaaaggtaggaattatcggagcgaccggttatgcaggagcagaactggtgcgtattttattgaatcataaagaggcacagatcgaatggtttggatcaagaagctatatcgatgaaaattatgcagatatttacagaaacttttttgaacttgtcgatgcagactgtctgggtgataacatggatgagcttgcttcccgcgtggatgtgattttcacggcaacaccacagggatttctggcaggtgtgctgaatgaggatattttaaataaggtaaagatcattgatctgagtgcggattttcgaatcaaagatgttgctacctatgaaaaatggtataagattgagcataaaagcccacagtttattaaggaagccgtttatggactctgtgagattaaccgtgataaggtgaccacccagacccgtctgattgcaaatccgggatgttatacgacctgttccattctgacagcatatccgctggtaaaagagggactgattgatccggatacattgattattgatgcaaaatccggtacttccggagcgggacgtggggcaaagacaccgaacctgttctgcgaagtgaacgagagcatgaaagcatacggtgtgacaacacacagacatacaccggagattgaggagcagctcggttatgcggcaggaaaagagattacagtgaattttacaccgcatctggttccgatgaaccgcggaattcttgcgacagagtatgcaaccctgatcaaaaagccggatggtacctatccttcttatgaggaactgaaggctgcttacgataaatattatgcaaaggaacgtttcgtgcgtgtattaaagaaaggtgtctgcccggagaccaagtgggtagagggcagcaattacgtggacgtaaactttgtcattgatgagcgtaccggcagagttgtgatgatgggtgcactggacaatctggtcaagggtgcagccggacaggccgtacagaacatgaatctgctgttcggatttgatgaggcagaaggactttccatggttccgatgtttccataatgaaatgcatctgtttgatgcatttcctacgctcattgtttccgcgtaagaggaactttcatacaatgagctctataatgaggtgaataatgagtaaagaatatacaatccgtgtgatgacactggaagattatgatgaggtgtatgcgttgtggatgggcatccacggttttggaatccgttccatcgatgattccaaagaaggagtggagcggtttttaaaaagaaatccgaccacgagtatggtagcggtagcagatggaaagatcgtgggagccattctctgcggacatgacgggagacgcggatgtctgtatcatgtctgtgtgcatgaagattaccggaagaacggaatcggaaaagccatggcagtcgcatgtatgcgcgccctgcagaaagaaaaaatcaataaggtcagcctgatcgcatttaagagcaatgagctgggaaatcatttctggaaagatgccggctggtgtttccgggaagacttaaactattacgattttacattgaacgaagcaaatattacgagatttaatcagtaaggagaatgttatgagtgagaatttaaacgcattggaaaaagcacaggtgctgattgaggcattgccttatatccagcgttttaaccgcaagattatcgttgtaaaatacggtggatcagcgatggtagatgagaaactgaaaaaacaggtcatccaggatgtcaccctgttaaagctggttggattcaaaccgatcattgtgcatggcggtggcaaggagatcagcaaatgggttgccaaagcaggaatggaaccggaatttatcaatggactgcgtaagacggatgcgcctaccatggagattgcagagatggtgttaaaccgtgtcaataaatcacttgtatccatggtgcaggaacttggggtgcaggcggtcggcatcagtggaaaagacggtggtctgttaaaggtggaaaagaaattgtcggatggtcaggacatcggatatgtaggagaagtaaaggaagtgaatccaaagattctgtatgatctgctggagaaggatttccttccgattatctgcccgatcggtcttgatgacaattatgatacatataatatcaatgcggatgatgcggcatgtgcgattgcccgtgcggtttccgcagagaaactggcattcttaaccgatatcgagggagtatacaaagatccggaagatccgtccactctgatttccgaacttacggtttccgatgcaagaaaactgattacagacggatatatcggcggcggtatgcttccgaagctgaataactgcattgacgctattgaaaacggagtatcccgtgtgcatattctcgatggaagaatcgcacattgtctgcttttggaaatcttcaccaatcgcggaatcggtactgcaattttgggtgatgaagaacatcatttttacaatgaataa

SEQ ID NO: 130 - DNA, 7030 bp, unidentified
  source 1..7030: mol_type = unassigned DNA
tcattgtttcttatagggcagacatcggtatcggggtttatttttgctccgacttccatattcaatcgcctgggcagggcagttgcagatgcaggccatacaatgtgtacagtgctttccccatacagggatttggttattgagtttcacgttattcaaagggcagtttgcaacacattttccacacccaacacaggagtcttttgcgtaaaagaggtctgcctttatcacaaagcggtaaaaggcacggttgactaagccacttttgatgcgatccacaatccctactttacgttgggggaagtccctatcctgggcgatccagttaacaccatgttgaaggacagggagtgctctctcaatgatctgctctgcctcctgttcttccggcacaggaaacaacgcaatataattttctggcattaccacctctagggttcctcggtaaataagcccctttgcctggcataattccgctagatatcgccctgcgccgccaatatcactgccacaagtcaggacaaaataggcccttttgtcccccagcagctctacggctctaagatattcctcaaagatatgaggaagttgccaaccataggtaggacttacaaaaacccaaggcccagtagaaaaaattgggcttttttcaccacttttgattcgttttcctagatctaggagtttttcattcaactgctctgacaaaagttcagcggcataacggctgtttccagttccggaaaaatataagatcattaggacttctcccccatctcaatagccacttttatcacgttatcccgccgatgttcaaagaggtcataggccgcctcgatctcctctaggtgaaaggtatgggtgattaacggcgtggtgtccagcattccctccttgatcagctttaatatctccgcacagctgcaaccatccacaccaccagtcttgaaggtcagatttttcccgtacatttcgggcaagggcagctgctgaggaccgtcatacagcgccactactgccacagtgccattgggtctggcacactgccaggccatacgaaaggtttccgctccaccagcgacctcgagcactacatccgcgccgccgtggtcgctgtttcgccgtacatagtccagtgctttttccggtgtggtcgccagcacctgaggatagtaacggtggagaaactggaggcgctgttcttcccgctcacatacaatcacacgttttggactttttaacaaaacacactgtaaggtacatatacctgtcgggccggccccgatgataagcacagtgtcatcagggctgatatctgatatctgggccgcccaataacctgtagacagaatgtcacctacaaaaagggcctgacggtcagtcacggaatcagggatcttatccaagctctggtccgcatagggaactctcacatattctgcctgcccgccatcgatgcggcagcccaaggcccagccaccatttgggtctatgcagttattcacccagccatgctggcagaaaaaacagtgcccacagaaagtctctacatttacggtgaccctgtcaccaggcttcactgataatacagcaggaccagccttctctactacgcccaccatctcatggccgaccgtaatacctggcactgctcttggtacagagccatgcttgatgtggaggtcactggtacaaatgctggctaaggtgacccgcacgatcgcgtctcggtcatccaaaatcactggtctctctttctccaacaatttgaatgttccttgttccaaaaaagtataggctaacatattcattatccgctccattgtagtttcttgattccagcatagcattttccaaaacaaaattcaagggaatcaaaacaaaggcagaggccctgtccccagacaaggcccctgcccttcatttgatcatagatttagattcaaaatcccaggccctgaatatagccctggatgcgctcaaagcccctcttaatattttcgtcagaggtggcgtaggtaattcggatgaatccttccccactgtcaccgaatccggatccagggacagtaacgaccccggtcttcttcagtagatccatacacaagtcacgggaattcatcccggtgaactctgtcagttccttggcattgacaaaggcatagaaggcgccctttggctttttaatagacagaccaggtgtctggtcaatcagtgaacagatcaggtcacggcggcgaagatagctctgccgcatattctcaatctcagactggcactgacgtagcccacaggcggccgcaatctggctgggggccggcagacaggaagctccgttctcgtgcagtttagtcatgttacggataatatcaggctgggagatcgcataaccaaggcgccagccagtcatggcaaacattttggagaagccgctaatgtacacagtcttttccatgattccatcaaaggaggtaatgctggtatagcccgcatcatcataaactaaccggctgtatatctcatcggcaatgataaagatatcccgctcgcggagcaggtcagccagggctttgcaagtatccttgtcaatcaccgcaccggtaggattagagggtgagttgagaatgatagcttttgttttaggtgtgatcgcggccttgatgtcatcaggatctgggataaatccgttttcctcacgtgctgggacacagatcattctggcgcccaccataccaatctgtccaaaataattaggccaggccggtgtgattacgatgacttcatcaccgggatttaccaaggtgaacaaagccatctggatcgcctcagtggcaccgcaggacaccataatctggtttgtgggatcaggcttcagatcattggcatggtactccgcaatcgcttggcgcagttccaacacgccactgttcggggtatagtgagtcataccggactcccagcatcggcatgcctcttcaatgatggggcgcggagtgataaagtccggctcgccaactgtaaagctgatagtatcctccattttcaaggcctcattgaacatctcccgaatgactgatccacccagattttgggccaaatttgacaactgcatcgttcattcactcctacaaatcagtttgttgtatatgcttaggcacccagataggctgccttcacacgctcatcagctagcaaatcctgagaggcaccttgcatggtaattttccccgtctccagcacataagcgtgggaggccgtattcagagctaaaaaggcgttctgttcgatgagcaagatgctagtgccagtttcattaatctgcctgatgacgcgaaaaatatcttctacaacaataggagccagccccatggaaggctcgtctagcattaacaggcttccgttggtcatcaaggcccggcctaacgccagcatctgctgctcacctccagaaagtgtcccagcctgctgcttttcacgctccttcagtcgtggaaagatagtaaatacccgttccagaccatcttttatgaaagctctatcttttatcagattggctcccatagtcaggttttcagtgacggacatcttcgaaaatacccggcggccttctggcacatgggcaatgccctgttctacaatcttatggggcttcatcttggtcaattctgttccctgaaacagaattgacccgctttttgcgtgctccagaccagagatggtgcgcagaatggtggactttccagcgccattggacccaatcaacgccacaatctcccctttttccatcgagaaggaaacgccttgtaccgcattaatggctccataggacacatgaagatcccgaatctcaagtagcgacattctgatagcctcctcctaagtatgcctcgataaccttcggattggcctgcacttcggcgggcaccccttcagctatggtcttaccaaagtctaagactttgatgcggtccgcaataggcattacaaagttcatgtggtgctcaatcaaaatgatagtcacaccaaagtccttgcgaatctgtgctaccaggttcgccatatcctccagttcagtggtaatcataccagctactggctcatccaacaacaggatcttgggatccgtcatcagggcacgtgcaatttccagacggcgctgatcgccatagggcagattttttgctagtaaatttgctttgtcggccagtcccagacggtctaacagacccatgaccttctcatccagctccctttcgctcttcaccatgcccggtgtacgcaaaaaacatttggctagattctggtcgttatgcatagtatgggccatctttacattgtccgccacactggcattagagaacaggcggatgttctggaaagttcgggtaatcccctgtcgcgcaaactgatagggtttaagccctaccatatccaccccatctagcttaatggtaccggtggtgggtttgtaaataccggtcagcatattaaatacggttgtctttcccgcgccgtttggcccaataatggcaattaattcgcccttttcaacttccaaattaaaattatccacggcgcaaagcccaccgaacatgatagagaggtttttgacctcaagaagactcatatcaccacttctcccttctcaggacttagagacacccgcaggctctttatccttctttgagccaaacagcggagtctcgtacagggacgcacgagaaatacgcataaagggaacttccttgccaccacaaagcccctctgagcgatagagcatcacaatgaccagaatagccgcatacaccgccaggcgccagtcggccaaaaagcggagaacctcaggcaggatggtcaacagtgtggcgcccaaaatagaaccagtcagagatccggaacccccggcatacaagtagaccaagaaatcggagctctttgtaaagctaaaggagtccggctgaatgaaggctagcacatgagcatacaggccgcctgctacgccggcaataaaggcagcgatacagaacgatgtgatcttgtagcgggtagtattgatgcccatggcatctgcagcaatctcattgtcccgaattgcgataaaggcgcggccgtagggagaatagataaggttacgcaatagatataacgtcaacgccataaagaataagatccaggcaaaattggagtaatttggaatgccaatcatgcctctggctccgccaatcggctggatcagacgaaggatagcgcggacaatttcaccaaaggccagagtaacaatggccaaatagtccccctttagctttagggagggcatcccaatcagcactcctaccaaggcagccacacaccctcctaccagtaggcctaacaaaaagacagggacctgggcaactaccggaatattcttaccatcaaataccatggtggtaatgaccgcggccccataagcacctagggacataaagccagcgtggccaatgcagaactgtccagtaaagccattgaccaagttcagactggctgtcatcataatgttgatgccggcaaacatcatgacttgaatataatagccatttaggatacccacagagcgcaggaccgttacaactacatataaaaggacaacaattaaggcggggtaaatcgacttaatcaatttctttatattcataaagatcacccctccttaaactttctctatgaccagcttgcccatgataccggcaggcttgaccaaaaggataacaatcaaaataatgaatccgacagcatagccgaaggtagagttcaaagcggtagcaaatatttgggcgatcccaaggataaagccccccaacatggcccccctaatatcaccgataccacccagaacggctgcgacaaatgacatattgcccagccaggaacccatatacacatcaacctgaggataggcactggcatagcaaataccagacactgcggccagagcgccgcctacgaagaatgtgatggaaatgacgcggttgacattgatacccatcaaagaagctgcatccttgtccatactgacggccctcatctgtccaccaatctttgtgccattcaccatgaaatatagtgccatcatagtaacagcagccaatatgatcatgataatctgggtcgaagtgatagacgcccctaaaacattaaaggttttgggcgtaaatagtgtggggaacgagcgaggattcgggccaataaaaggtaaggcccttggaaagttctccaaaaacatggagacacctacagctgtgatcaacgcgatcattctaggtttattgcgcagaggtctgtaagcaatcgcctcagtcgctacagcgattccgccagtgcccagcatagcaatcaatatgataatccctacaataagcattgggaatgttccatcaatctgatagctggagaaaagttgagcaataaaataggtgcccaatgcaccaatcatcaaaaagtcaccatgagcaaaattgatcatgccaacaatcccatagaccatggtatagcccaatgcaagcaacgcatatacgctgcccaattgcaagccgtaaactaagtattgtaggatcgtagccacaggaacgcctcctatcatgtctaaaaaatggatttactaagaaaggaaatgtgccggctggtatcaaacgcagccggcacattcagttatgcctaagaaagaattgctgccctatgtcaccgatgaaaaatccaaaagaaatcagctaggattgatggaagaaacataatgggaaacaccatcagcatcatactgcataaccacgccacccttaatggggttacgatcctcacccatcgtcataggaccagagggcagttgaagattctcaatagaagccagagcgtcacggacaccatcgcgggtcagctcttctgcattctgcaacgcatagagaaccatcatagtagcttcataagccagttcagcattggaattgggttgctcatcgggatgcagggcagtgtacttctcaacaaactcaacagc

SEQ ID NO: 131 - DNA, 5387 bp, unidentified
  source 1..5387: mol_type = unassigned DNA
ttagttcacaccaagatacttggcaacgaccatacgctggacttcggaagtgccctcgtagatctcggtgatcttggcatcgcgcatcatgcgctcaacgggatactcacgggtgtagccatagccgccgaagagctgaacagcgcggcgggtgacgtcggaagcggtctcggccgcgaagagcttggccatggcagcgtccatggagtaatcctcgtgattctgcttcttcatagcggcagcgtaaacgaggtactgggcagcctgagtgcgggtgtgcatgtcggccagctggaactgggtgttctggaactggctcaggcggcgaccaaactggatacgctccttggtgtacttgacagcctcgttgatggcgccttcggcaagaccgagagcctgggaggcgataccgatacggccgccgtcgagggtcttcatggcgatcttgaagccttcgccttccttaccgagcaggttctccttggggacgacgcagtcttcgaagacgaggtcgcaggtagagctgccgcggatacccatcttcttctcgtgcttaccggtggagaagccggggaagtccttctcaacgatgaaggcggtgataccgtggttgcccttgctcttgtcggtcatggcgaacacgacgaaagtggaggcaacgttaccgttggtgatgaagcacttgctgccgttgaggacgtagtcgccgttctcgttcttgacagcggtggtctgctggccggaggcgtcggtaccggcgccgggctcggtcagaccgaacgcgccgatcttgcggccggacagaaggtcaggcagatacttcatcttctgctcctcggtgccgttctcgaaaatgggagcgcagcagagggaggtgtgggcggaaacgataacagcggtggtgccgcaaaccttagcgagctcctccacgcacatggcataactgagaacatcgccgccggcgccgccgtactgcttcgggaagtaaatacccatcatgccgagcttggccatcttttcgacggtctccatggggaagcgctcttcctcatcgagttcctcagctaaaggcttgacttcattttctgcaaattcgcgatacattttgcggaccagcagatgttctttggacagatggaaatccatagtcttttgctccttcactataaaaataattggattgtctaatttttcacaaatcagttccgtgactctcattatatcctgtgcgtttcattttcgcaaggggaactatcattcctttttggaattcgtgcttttcgccgaattcattaaagtctttttgacatttccgttccttttatgacagttttctgtcattttcaggaatcctttccattccaaaagagaaaaggggaggcagtttttgtaaactgcctcccctttttatccttttagggacggattacttcttgctgtaatcgtagaagcccttgccggacttcttgccaagctggccgccgcggaccatcttcttgagcagcagagcgggacgatacttcggatcgccggtctcgctgtagaggacgttcataatggcgaggcacacgtcaaggccgatgaagtcgcccagggcaagggggcccatggggtggttcgcgccgagcatcatggccttgtcgatatcctcgacagaggcaacgccggtctcgaccaggccgatggcctcgttgatcatcgggatcaggatcttgttgacgacgaagcccggagcctcagcgacctcgacaggctccttgccgatctccttggagaggttgtagatgaagtcgaaggtctcctgcgtggtgttggcgccgcggatgacctcaacgagcttcatgctgggcacggggttgaagaagtgcatgccgatgacggcgtgcttgaggccgagacccatctcggtgacagacagagaagaggtgttggtcgcgaagacggcgctctccttgcacatctcgtcgagctcgccgaggagctgacgcttggtgtccatgttctccgccacacactcgatgacgaggtcggcgtccgccgcggcagacttctcctcgacgaggatgttgttcaggatggcgtccttggcctcttcggtcatcttgcccttctcgacgcgcttctgcagggaagcggcgagcttatccttgtggcgctgagcggaagcgacgctggaagcgtacatcagagcggtgtggcccttggccgcgaagacctgagcgatgccgctgcccatggtgccggcgccgaaaactgcaactttcattgtgtgtatcctcctacaatataaatagataattctatggaatcacttgttgataaagggctcgtgcttgcgcttttcgaggaaggcgcccatgccctcctgctggtcggcgctctggaagcaggagccgaaggccttctcctcgatcacgacggcgcggtcaatatcgacctgaagaccgtcgttgatggcctgcttggacgcgcgcaccgcgatgggcgcgttgccagcgatctggccggcgagcttttccgccgcggcgtagaggtcagaaagcggatagaccgcgttgacaaggccgatgcggtaggcctcgtccgccttgatgttgcgggcggtgtagatcatctgcttggccatgccggggccgacgaggcgggcaaggcgctgtgtgccgccaaagcccggcgtgatgccaaggcctgtctcgggctggccgaagacggcggtatcggagcagatgcggaaatcgcagctcatcgcgagctcacagccgccgccgagggcatagccgcccaccgccgcgatcgtcgggatggggaacgcttcgagcttgcgcatgacgtcgttgccctgcttgccgaaggcctcggcctcctccttgctgagctccttcatctgcgcgatgtccgcgccggcgacaaaggacttctcgcccgcgccgcggacgatcaggcagcggatctcgcttaagtccaccgcgtcgagcgcggcatcgagatcggcgagcacctgagaattgagcgcgttgagcgccttttcgcggtcaatgatgagataggcaatgttgcccttgggttcatatttgacaaaagacatcgtgtgtctcctcctgtcttcttcaactgccccctattatatgggcggcaaggcatatttgcaagagaaaaatcacttttttcaaaaaagtttcacacttttccggtgtcattgcaagaaacgttgcatttttaatgatcttttctcccaatgcagcaactcttgtataaaatttttaaaatgacttgtctcttgcaccaattttcgatatgataggctttaattataggaaaacgaggttcattctatgcgaatgcgcaaaaagaaaaacctgcttccccgcatggagcggtgcggggcgtatcagatcaaggacccctacgagcgcaagggccgctggcacgacttgatgcccgaggcgaaggagatccgcgtggagctcggctgcggcaagggccgcttcaccgtcgagacggccgcggcggagcccgacgtgctgctcatcgcggtcgaaaaggtgcccgacgcgatggtcgtcgcgatggagcgcgcggcgaaggcagagctgcacaacgtcttcttcatcgacatcgacgccaaccagctgcccgaaattttcgatgcaggcgaggtcgaccgcatctatgtcaacttctgcgacccgtggccgcccaagcggcaggccaagcgccggctgacgcacggcaatttcttgaagctctaccgcaaggtgctcaaggacaacggccaaattcatttcaagaccgacaacgacccgctgtttgagtggtcgatcgaggagatcccgcagttcggcttcaccctctctgaggtcacacgcgatctgcacgcgaacggacagcgcggcgtgatgaccgactacgaggccaaattctatgccgagggcaagaacatcaaccgctgcgtcgccacgatgcagccgtgggaagagcccgaggaagaggatacgcccgaagaggcggacgaaacggctgaataaaaggaaggctttcagccttcctttttgctttcttccagatacggcgaatacatcatcaccgcgtcgttcacggcgacaggcgtctccgcgagcagcttgccctgcaaatcaaacgtctgccggtagagctcgttgtggcggatgtagccgccccagtactgcgcgcgcatctcgtggttgcgctctacgaccgcatagcgctcggtcggctcggcgctcacgcgccactcgccctcaaggtctgttttgccgacgcggacgcgcatctgataggtgtcctgtgtgtcgttgcggatcatcaggtcaagataggggtaaaagcaggtcgcaccgctgccgaagggctgcgtgcggttcgcgtcgggaaagacgtcgtagccgtggcggtggcgctcgacgaccgtgagcggcgtgtgcagcgtcatccagtagatgaggtttgagagctggcagagcccgccgcccgtcgcggccagatacccgccgttgcgcaggatcatgccgggcagataccccttccccgctgtcggctttccgatgagataccagtagctcatcgtttcaccggggcgcagcaaaagcccgtcgagccgcgcacaggcgaggcggagattcgtcaccttgttgcgctggagctgcatgtcgacgtccttgagctttcgcatgagcggcgtatggtgggaaaacgcctgatatgctaagtcttccccgctgcgctcgcgcgcaaaatgcttccgcatcgaaagccatctgagttttcgctgcgcgctaaaatacgcgccgccgagcttcagccgcaaattagagcgttttttcggttcgcggacggtcatatgcttccctcccctgtttttctgcttttatagacgcaaaacggcgggaaaaagttccaacattttcttatttcaggctcatcacgtagatttgacacgggttccacacgtcccagagcgtcgggaatacctcaaactcgccaaaaccgagggcgagatagaagcggttcgtcgcgtcgtactcagggtacttccccatctgcacggtcttgacctgcaaaaacgagtagccaagctccttcgcccgctgcttcgctgcggcaaagagcatcttgccgacgccgcggcggtggtattctttcagcacgcccatgacatagagttccgccgtatccctccccgtttcggcaaggtaaaggaagccgacggcgttctcgccgtcgaacgcggcgaaaaacggctgcttaacactcttttcgatgtattcctcgcgcgcctctggaatgccaaaccagtcgggcagcgcctctaaaatcaagcgcgcgatgcactgcttctcctctgccgctgtgatctctctaacttccat

SEQ ID NO: 132 - DNA, 11322 bp, unidentified
  source 1..11322: mol_type = unassigned DNA
tcatactatctcacctgccgtttcccgatagatttcaaagaacttatcctcaagtggcatttccgccgtcacatgggaaagcgtgtcacacaaaaccatttttccgttgatgataatgccgacacggtcgcagatcttttcgatcagtgaaaaaatatgtgttgatacaatgatcgtttttccttctgctttcaattcctgcagaaaatcggtcacaaccttcgccgtgataacatcaagtccgtttgtcggctcatcaaaaataatgatctgcggatcatgcaccagtgaaatgatcagggatactttttgtttcataccagtggagagatttgcaaccttcacttccgcaaactcatccacaccaaatttctgaaacaggatacgttttctctcatcccgctctgcctgatcgacaccgtataattctgagaaaaaatcaaacagatagttcggagtaaaaaattcttccagttttaattcactcgtcagaaatccgatctttttccgaacaccgttcggatctgtcacaatactgcttccgtcaatcagagcatcacctttatccggtttgatcagcgttgctaacatgcgaagcgttgttgtctttcccgctccattgggccctaataatccaaaaacttcccccctgtaagtacaaaaggaaagatcatccaccgcaaccttaactttttccattgtcttttctaatttctgctgtttttttgacaagtgaaatgtcttggataatccactgactgtcaataactcttccataaccctctccattaaaaatttctatatcatgatcgtgatctacactcgcttcgctcggcagtcttattatatcgttccgtcatccatactgtcttcaatatcatcatagatatcatcgtaaatatgatcatagatgtcattatagctgctataagatccaagtcctgtaaaaaaaatcaggatatacagaataatcgatgctgcaaaaccgattccacctgtgatcaaaccaacgatcgccattccttttttgtttccttttacaagctgtatgataccaaaaataatcgcaagaataccggtgatccagctgatacaggtacagaacagcaaaaccgtaatgattccaagtactaacgacgcaataccaaagccttcactttctgacttattacttccatacctgccagccggttgtccgtaattatattctgtacttccgtttgactgtccatagttataacctgcactgtcatttgactgtccgtaattataatttgtattgccgtttccatatgacgtatttgtataatacggattgtctgtcatagtcttttctgaatttacacgctcttcatttccggtcacagtcttctctaaatttacacctgctgtaccatcagtcgtacttttctccaggctgacaggatttccctgatttacattcggctcatcatttccataattccagttattttcttcactcatactctcactacctcttaattaaatccgaccactttctgtgacagtcgatatgccgcaaccgaaatctttctgcctcccttgcccggcagattcattgcatttcccataattccggcgcgcagatgatggaataaacggatgtcttgatccttaatatatttccacagttcacgttttttcagaagattttcctcagtgccggagcggatcagcataatcgtggaaatgaccgtgatgatttccagataattaaacatgtaatgacgcagttttcggtttggaatcttccagagatcaaattcatctaccataatcttatttacattgatctgctggtcgatacggctgatcatcactttctcattgaccgactgatcttccctgccaataaagtaacggtaaaaatctacatccatataatacagtgtttttacacttggtaatggtttgtacacataaatattatccacataaaatgtatgtttcggcaactctaatccacattcacgcagcagttttgtacgataaatcacagaatgcatcaaaatgtactgaccctttctgaaacgtgacacatcattccaggtaaaaatctgattttggggcaggttcgtgtagtgcatcacttttttatgatgcgcaccttctttttcatatacataattggcaataaacatatccagggtctgattgccgccggtcagctcacgaagtttatctaaaatcttcttataagcctcctcatctacccagtcatcgctgtctaccactttaaaataaagtcctgtcgcattgcggattccagcattgacagcctctccgtgtcctccatttacctgatggattgcacggatgattcccggatatttcttctcataggcatctgctatgtcaccggtgctgtcttttgacccatcatcaatgatcaggatctcaacatcatcgccacccggtagcagggatttgatacagttttccatgtaatcctgtgaattgtaacacgggatcgcaaatgtcagtaatttcatatatgaatcctccgattatctttttgtattttctgccatgatcgcatcagcaagttccatcgcctttttcgtcatcgcatcgatattatagtatttgtattctgccagtcgtccgagcagataaaaatgcggcagtccacctgcaagcgcatgatatttttcatagagttcctggttctttggctctaatatcgcatagtaaggaatttctccctccgctcctgtgtaggcaaacggatactctttcacgattgtggttccgtccgtgttcttttgtccggtcagatacttaaactctgtgattcttgtaaaatcctcactgaccgtgtaattgaccacgctgtgtccctgataagattctttctcataatgttcaaagtcaaatcttaaggaacgatatggaagccttccaaactgacagtcaaacaactcatccagtgcgcccgtatagataacctctccgtcaaacggtgttccatcaaaataaatctgattttcttcaaaacgtaatctctctttacagtcaacacctgtctcaaccgtgatgttctcatggtctaacatgcgctcaaacatcggtgtgaaaccttccttcggcactccctgatatttgtcctgaaaatagcggttgtcataagaaaccagcaccggcacacggcctgtcacttccgggctgatatcctccggtttttgtccccactgcttcatggtatattttaaaaatacattttcgtacacaaactgtgcgatctcgcggatgtccggatcttcattttcccgcagtttcatgatcggcacgcggcttccctctccgtatgcagcaatcagtttctgctctaatgcatctgctttttccttttcatataccatatgaagcgtatttaaattaaacggaaccgggatcagacgatccccgacctttgctaccacctcatgtccgaatgcataccagtccgtaaatcttgagagatactgatatacttcttctattcctgtatgaaaaatatgtggtccataattatgtattaatattccatgttcatccggctcatcatagcagttacctccgatatgactgcgtctctctaaaaccagtactttctttcctgcttcctctgcaagctttctcgcactgacagcacccgcaattcctgcgccgatcacgatacaatcgtacatgtaatcctccttgttttgcggagcaaaatccgagtccattgacgaggagaggattttcctccttgttttccactttgttttaccatagccattctattatacacattttcctaccgcaaaccaatcaaatttttctttagatattcttaatttctgccaaagtatgtagttgttcatattttatttacataattctcacaaacagggcatacggcggtcacaattccccgatatactaaattcaaagttaaggcaacaagttaaaatttttcatagaactttttttcatacctgatgtaagtcaggtagccttgcttatccgataagcaaggttcctcccagcaaatagtgaattacttcacttttcatacacactctttttcataatgaatagccggtgctgttgcaccggctccctctttttataaatattttcttttaagctttcttttcatttccaagaagaatgttcatatatttcgcatacgcagcaaaagcggacggaatagcatatttttcttttgcatcttctgcttccacaaataataatccatctgcacgatttttttcacactgcacctgtggatgcatttccggctcctctacacggactgcataacctgtcatgtgccattcgatatgggaaaaaatatgtttcgcctcacctaacggctgaatacggatcggtgcataccccatctcttttaccatggaaagtacttcctcctgtcccatatttccttccacattcggaagctcatacagtcctgccaaaagtccctttgccggtcttttccggattgcaaccttctcatcatcccttaaaatcagaaccgtttttttctcgatctttcgcggttttgccttgctcttgactggtatctgtccgatcagttcctgtttttttgcctcacaaaaatccttccatggacattcggtacaaagcggtgcaccgtttggcacacagatcgttgctccaagttccatgagtgcctggttaaacgcaccggcaagattctgatgatatacctttgccctcagatcatctgcatcctccatccatggaaatacatttttttcatttctgccgtctgccccatgcatcaatttttctaataatttttccatctcattacggaatgactgtttcatgatatccgtatcatccgcagaaacgcgcgttaaaacacggagcacatttccatcgaccgccggaaccgggattccgtatgcgatagatgcgaccgctcccgctgtataatggccgatcccctttagtttcaacagtttctcataatctgccggaagttgtccaccataattttccacaacttccacagccgctttttgcatgttcctgacacggttataataacctaacccctcccaaagctttaaaagttcatcctccggacacactgcaagtgcctttgcatccggcagtgccgtggtaaaccgctcaaaatacggctttaccgcctccactctcgtctgctggagcatgatctccgaaacccacacccggtatggagtcggttcctctcgccatggcaatacacgggcatgatttaaaaaccattgcaataatggggatacaagttgctttaagtcgtaatcttttaacatgtatgtctcaaactttctttgttatatagcagccttcatgtctgcgcttatttttttcaaaccagtaccttatttgaggtcaaactggctgacaaatactgcgatcttctctaaacatttcttaataatgtctttggaataagcataagagcagcggatgtaaccctctgcacaacttccaaatgcgtctcccggaatgactgccaccttctgttcctgcagcagacggttacaaaattccatgctggtaagtcctgtttttttgatcgacgggaatacataaaatgcaccttccggttctgtcacatccagtcccatattccggaacccgtccaccatgatctttcgtctctcatcgtattctttacgcatcacatcgatctcttcgtcacgaaccggactcgtcagtgcttcaagcgccgccacctgtgacgttgttcctgcagacatggtcgtaaactgatgaatcttattcatatgaaaaataacttccgcaggacccgctgcaatacccatacgccatccggtcattgcaaatgcttttgaaaaaccatttaataccacacaacgctcatacatatccggcagcgccgcaatagatgcatgctttttgccataggtcagctctgcataaatctcatctgtaatcacaaaaatatcatgtgcggtcacaacctcacggattgcttctaaatcctctttttccatgatcgctccggtagggttgttggggaatgagatcagcagtacttttgttttatctgtaattttttcttcaagttcttccttcgtcaggcggaatttattctctgcctttaacgggatggaaaccggaatgccgccacacaattccacacacggaatataggaaacatagcaaggttctacaactaacacctcatcccccggatccaccagtgcacgaagcgccagatcgattccctcactcgcccccattgtgatcagaatttcattttccctgtcataatgaagtccaaacttttccagatactctgcagatgccgcacggagttcgaccgtaccgcgattatcggtatactttgtctcacctcttttgattgaagcaatcgctgcctccctgacatgttccggtgtcggaaaatccggctcgccgacaccaagtgacaatgctccctccatcgtatttgcaatatcaaaaaagtccttgatccctgaatccggcatctcctttactaccttagataagtatgatttgcttgtgtccatggtttttcctcttttctgtgtctttgtcaaagtatcataccacctatcatagcactttttctaccaaatttatagtgaatttttcccataatctattgacaaattcagggaaaagctgtacgctattaataacgtatattgttaattttttatcaaactattcaggagggttccaaacgatgagcgattttaacaatttaaaactggaagttgctgaggagattgctgttcttacaatttcaagaccagcagcattaaacgcattaaacagcgagacattagacgagttaaacacagcattaactgagatcgaagcaagagacgacatcaaagtcgtaatcttaaccggcggtcctgacaagaaaggcaacgaattcaaatctttcgtagcaggcgctgatatttctgagatggtaaactttaccgcagcagaagcaagagctttcggtatgagagcttccgtaccattcttcaaattaatgaacatgcgtcaggtaacgatcgcagctgttaatggttttgcacttggcggtggatgtgaaatttccatggcatgtgatatccgtatcgcatctgacaacgctactttcgcacagccagagacaggtcttggaatcattcctggattcggcggtacacaaagacttgcccgtttagtaggcatgggacgcgcaaaagagatgatctttacctgcgattccgttgatgcagcagaagcttaccgcatcggtcttgttaataaagtagttgctccggaagagttaatgaacacagcaaaagctatggctaagaaaatcatctccaaaggaagctacgctgtttccgttgcaaaagcagcaatcaacaacggttatgatatggacatcaagaacgctgttgagatggaagcaaacttattcggcgtaacctgctctactcatgacaaaacagaaggtatgactgctttcttagagagaagagctgctgatttaacagatttctaaaaaaacatatcaaaaaaacgggctgataattcagtccgttttttttgatatactcatattccaaatttaatgtgcaggtaatctctgattacctctacgcatttttcacgcccccatcaaaaccgacaccaccggcatcgtcaccgcagcaagaattgccgtaagcgcaactcctcttgccgccagatcataatttccatcatactgctgtcatactgccgacaggcgttgcgagcatgaccatacacacgcctaaaatcatcggatcatcaacaaactgctttatgatccatgtgcctgcaatcaaaaaaagcgtcagaaccctcttagttccaacgcctttgtcaataatttttatcatttgtatgtaatatagtcgatagctatatttttgtcaatatcccgctgtttctatatttcagtggagaaatgccatatgtttttttgaaacttctgataaaatagcttacattctggtatccgctctgcatagctgtctccgtcactgaaagatcggtgtcctgtaacaactgttttgcattctccaaacgtaaatatgttatatattgcgacaatgtaatatggaaatgttccttaaaataccgcgatatatatttttccgaaagatgaaactgttccccaaattcctttagcgatatctttcctgtaaaattctgctgtatatatgaaaccatctctttttctacaatatttctgccgcttgtatcattttctattacaaatcctttcttccacatttcaagaataaattgtaaaagaattatttttgtctttatctgcgcagttatttttgactcagtttcatcattttctgccatatatatatcaatcagctgctcacacagttcttttgccgagtcttttactcttgggtttatcatcaaatgaccgctatttaatggttcaagcaatttatcatctaacatgtcatcggtccgaaaagatatatattttaacggaaacaaaaatgtaaaataatccacagtgccggtctgtgagcccataagatgcagattgcccggcgatacaacgaacgcatcccctgcttttccaatataactctctcctgatatacttaccgtcagcaaaccactttttacatatataatctcaagttcatcatgccaatgtaccggtatctgaaatgaccgccccgcattctctatgtgatatatactaaatggattgtcctttgtgccatgtggtttattttcctttaattcaaagtacatactctctcctacaattctacaaggctcttgcttttccattttccgctcttccatctaagcaccattccaacagctctcgcgcactcatcacctgccatggcaatatatgctcctactgcctgaagtcccatatgtattccaagaaaatatgttccaccaactgcaaacagatacataaatatcgcacccattataaccggaaaaaccgcatctccactggtttttaatgcctgaccatatacaagatttgtcacccttccaaattcaaggaatatatctactattaacagccttaccacaagatttatcatttgcgcatcatccgtaaatatatgaactataaaatgtccggacatcgcaaatgtcacagagaagcacgtcgctgttataagaccatataccacagctttccgcgtacccctgtcacattcttcaaactcctttgatccaattctccagccagtcataatagcattagcctgtgcaagtgcagctcctatacaatacgaaaaatttgctatctgcatagcatatgaacgggctgtaacattcattccgactgcatccatctgattcatgaatcttactataagcgtcattgcaacattataaagtgctgtttcaaatgcagaaggaaaacctatcttaacaatctgcgcaagtatcttccgtggcggaatgcgctccggactctgctttgcctttatcagtacagcacccatgcctgctacaatgataaggttcacaacttttgaaataactgtggcaatagcaacgcccattactccccaatgaaatacaaacaggaacactgaattaaatattatattaatggcatttcctgcaatcgttcctatcaaggaatgctttgtatatccaaacactctgagatagctggaaaaaatgggaataagcgcatttaaaacacatgcacctccaacaattttaaggtatgtttctgccggctcaagcaaagccggagaaatacttacgattctaagtatttctccagaaaaaaaggcaataataaccgacataaggatacctgtcagtgcgttaaacataagtccaagctgtctggcctgatatgcaattccaggtctccccgctccgatattttgtgacataactgctaccataccggatgatattaccccgaacatgatgataaaaacacttatatacgtatttgctgttccgacagctcccacagcctggtcgcttacagacgataacataagtgtatcgaccatgcctgaaagcatataaaataaagtctctaagcatattggcacagccagctgtgtcaatgtttttctttcagttgccatgtttttctcctatgaaaactaatataacatacattatcaataatatggtatttttctgcatatttcttgtataatattatgcaaaaattgcattatttctacttatttacgaagtgaatcagcaagtctgttaattttgccctgatctgcattatcataggaaaatattttatgattccacattctcatctctgcataaaatgttgacgtttccccccaaatagactaggatagaatttgaatgataaatacgcaaaacaaggaggaaaatcctctgctcctgcaatggcagtcgcattttgctccgcaaaacaaggagggaaatcctctgctcctgcaatggcagtcgcattttgctccgcaaaacaaggaggattttatgttagataaaatgattggttttatcggtgccggcaatatgggaagcgccatgatcggcggtattctggatgcatctttagtgacgaccagccagatcatcgcaagtgcacactctcctgagacacttgataagatccggacaaaattttccatagagacaacccagtcaaacgaggtcgttgcagaacgaagcgatattttgtttctcgctgtaaaaccaaataaattttccgaagtacttccgcagatcaaaggtcatttaaaaccggactgtatcgtagtttcgattgcagccggacagccgatcgcaaatatcgaggcgctgctcggtgaggtcagactgatccgcgccatgccaaacaccccggcgcttgtaggcgctgcgatgagtgcactctgtccgaatgacaaggtaacaccagaggaagtaaagctcgttgagtccttattcaacagcttcggccgtgcagaagttgtaccggaaagcatgatggatgccgttgtcggcgtttccggttcttcccctgcctatgtctatatgtttattgaggcaatggcagacgccgccgttgcagacggcatgccgcgcgcacaggcttataaatttgctgcccagtctgttttgggcgccgcaaaaatggtattagagaccggaaagcatccgggcgaattaaaagatgctgtctgctctccgggcggtacgaccattgaggcagttgcagctttagaacatggcggtttccgtgatactgtgatcagtgcacagcgcgcatgttctaaaaaatcatatgatatgagtcaaaaataa

SEQ ID NO: 133 - DNA, 7627 bp, unidentified
  source 1..7627: mol_type = unassigned DNA
atggaactgatttacacaaatgatttatgcaccggatgcaacaaatgcgtgcggggctgtcctgtacttacggcaaatattgcaacgcaggaaggttatgtaacggtagacccggacaaatgtattgcatgtggggaatgctttgatgtctgcccacatgaagcgagagactattatgatgatacggaccgcttctttgaagaccttgcatcgggaaagaaaatttccgtgatactggcaccggcatttctggcaaattatcccaaagaataccagcgtgtgctgggatatttaaagagtaagggagtcaaccatatctgcagtgtatcgttcggtgcggatatcacaacctggggatatctgaaatacattacggaacacaaatttttcgggggcatttcccagccgtgtccggcagtagtcacctatgtggaaaaatatataccggagctgattccgcgtctgatgccggtacacagtccgatgatgtgtactgctatttatatgaaaaaatacatgcaggtcacagatgaaatcgcttttatcagcccgtgtattgccaaaaaattagagattaccgatccaaattgcggcggatatgtttcttataatgtaacttttgaaaagatgatgaagtatatcggaaacgattatgaaggatgtgaaccatataccgatgaactggaatatggactggggtctttgtatccgatgcctggtggattgagggagaatgtagaacattttcttggaaaagagcaggtagtgcgtcaggtagaaggcgagcatgaggcatatgaatatctgcgttcctatgcaaaacgcattcagcagaataaagaacttccgtttatggtagatatcttaaattgcgcgaagggctgtctctacggaactgccacagatcctaaacggggaacggatgatgtcatgctgacaatcgcaaaactgcggaacagcaaaaccagtgcaaaacaggagaaggcacactttggcaggaagagcaaaagcaggagtccgtgggcagatacactgacaccggaggaacgtctgaaaaacttcatggacgcttttggaaagctggacatcaacgattttatgcgcagctacaccaatcgcgcagtacatattgaggaaccgtccgaacaggagaagaaccgcctgtttacagaaatgaaaaaagatacctacgaggaacagcacagggactgcgaatcctgtggatattcaagctgcaccaacatggtacgtgccatccacaatggagtcaacgtaaaagaaaactgtgtgcactatgtgcggggcatggcagaggaagaggcaaaaaagattgcagaacttcgcgatcaggagcggacggaacaggaaatccgccagcagaagattacagatatcacagaccggtttattaccctgagtgataacattgcagaattgaatacggcaaatgaggagtctgcaaatgaagcgactaatcttgcgcagtatattcaggatatttcccgcctgtgcgatgaactgaatgaatccatccgcattatgtcggatttcatcagtgtatataaaaagagcaatgaagatatttctgccattgcaggacagacaaatctgctttcgctcaatgcctccattgaggcggcgcgtgccggcgagaacggaagaggctttgcagtggtagcggaggaaatccgtacactgtctgattccacgaaggatcttctgacacagaacgaccagaaagccgaggcaattctcccaaagattacacagagtatggattccatcaaagatctggtagaaagcatgaataccatgacacagaaagtgtcaacgattgccgcaaacacggaagaaatttcttcccagacgacctatgtacagaatatgacagaagaaatgcgggatgaggtgaaagaactgtagatgaaaaaggatgcgtattacacatccggacaatttgcaaaaaaagcacatgtgacacttcgcgcgatccggtattatgataaacagaatattttaaagccaagtgcacggactgccgcaggagcgcggctgtatacggatgcagatctggcaaaactccagcagatccttttattaaaatatctgggattttcgctggaagatatccgggagatgacacttgctgcggcagaccagcagtatcttctcgaatccatgcggatacagaagaagctgctgcggcagaaaatggacgaaatgcaggcgatggatgaggcaattgaccgcaccatagaagccatccagacggaacaggcgattgactggaacagtatgctggatctgatccatctgacggcagtggaacgaagcctgaaaaaccagtaccagaatgcggcaaatatttccgctcggattcgcctgcacagggagtattccgtcaatccgcaggggtggtttccgtggattatgcagcagtgtaatctgcagccggggatgcggattctggagctcggctgtggaaatggagcactctggaccgaaaacagggaacaactgcctgcggatctttgggtcgttctctcggataaatcagaaggaatgctaaaggatgcccggcgtgcactgagagaggacagccgcttttcctataaaaaatttgactgcgaaaaaattccttacgaggaggaaatgtttgatcttgtgatcgcggatcatgtgctgttttactgtgaagatatcccgcaggtgcttgcagaatgtcggagagtcttaaaaaatgagggacggtttctatgcagtacctacggaaagcagcatatgcgggaaattaccgatctggtgcagcagtttcataaagaaatcgttttatcagcggaggtgctgtatgagcggttcgggcttgaaaacggagaaaacctgttagcaccgtattttccggaaattcagatgcgaagatacgaggatgcgattgaaatagcggaagcagaaccgctgatttcctatattctttcctgtcacggaaatcagaaccagctgcttttgaaccagtacaaagagttccgggaatttgtttctgcccgcgtggcagatggatttcatatcacaaaagatgccggaatcttcctgtgcagaaaatagtttgaaaatctataaaaaagacttgaaggtgacctagcgtcaccttttataatgcaatcaaatagaaaaattggaaactcacacaggaggaaaagtacatgactattattgtaacgggtggtgccggtttcatcggcagcaactttatcttctatatgttaaaagaacatccacaggatcgcatcgtatgtctggattccctgacctatgcgggcaatctgtccacgcttacaccggtgatggatcagccgaattttcgtttcgtaaaactcgatatctgcgaccgtccgggagtatataccctttttgaggaagaaaaaccggatgtgatcgtcaattttgcagcggagtcccatgtggaccgctccattgagaatccggaagtctttttgcagaccaatattatcggtacgtctgtgctgatggacgcatgcagaaagtatggtatttcacggtatcatcaggtatccacggatgaggtgtacggagatctgccgctggatcgcccggatctgttctttcatgaagatacgccgatccacacctccagtccttacagcacttcgaaggcatctgcggatctgcttgttatggcatatcatagaacgtacggcctgccggtgacgatcagccgttgttccaacaactacggcccgtatcagtttccagaaaaactcattccgcttatgatcgcaaatgcgctggcagacaagccacttccggtatacggagagggactcaatgtgcgcgactggctgtatgtcgaggatcactgtaaggcgattgatctgatcctgcgcaacggaaccgtcggagaagtctacaacatcggcggacacaacgagatgaaaaatatcgatatcgtgaaactcatctgtgaatatcttggcaagccggagagtctgatcgagcatgtgcaggacagaaaaggacacgatatgcgctatgccatcgatccgaccaagatccacaacgagctgggctggctgccggagacgatgtttaaagatggtatccgcctgaccatccagtggtatctggatcataaggaatggtgggagaacatcgtaaacggggaataccagaattattacaaagaaatgtacggaaagaaaggcttataaatatgaaagtattcgtgacaggcgttgccggacagctgggacatgatgtggtaaacgaactgacaaagcgcggacatcaggcagtcggttcggatattgcaccggcactggagactaccgtaaaatatgtgccgcttgacattaccgatgccacagcggtagaacagactatccaaaacgtgcacccggatgccatcgtgcattgcgccgcatggaccgctgtggatgcagcagaggacgaagaaaatcaggcaaaagtcagagccatcaacgtagatggaacgaaacatattgcggacgcagcgaaaaaagcagatgccaaaatggtctatatcagcaccgactatgtgtttgacggacagggcgagactccgtgggagccggactgcaaagcatacgcaccgcttaacgtatacggacagacgaaacttggcggggaactggcagtagcacagacactcgggaagtatttcatcgtgcgtatcgcatgggtgtttggattaaacggaaaaaattttattaagaccatgttaaaagtggcaaaaaatcacccgcaggtgcgcgtggtaaatgaccagatcggcacaccaacctatacttacgatctggcaagactgcttgttgacatgatggaaaccgaaaaatatggttattaccacgtaacaaacgagggtggttacatatcctggtacgatttcacaaaagaaatttaccggcaggcagggatttctaccgaagtgcagcccgtgacaaccgcggaatacggtctgtcaaaggcagcgcgtccgtttaacagcagactggaaaaaaagaaactgaaagaaaatggatttacaccgcttccaacctggcaggacgcactggggcggtatctgcaggaattaaagagacagggggaactttaagatgaagggaattatattggcaggcggcgcaggaacacggctgtatccgctgacgatggtaaccagtaaacaattgcttccggtatatgacaaaccgatgatttattatccgctgtctacactgatgctggcaggcatccgtgatattttagttatttccacgcgggaagataccccgagatttgaagcacttctgggggatggaaatcagttcgggcttcatctgtcctacaaagtgcaaccgtccccggacggtctcgcacaggcatttttacttggagaggaatttatcggagaggatgcctgtgccatggtacttggtgacaacattttctacggaaacggattcggaaaaattctgcgcaatgccgcaaaggatgcacaagagggacaggcaaccgtctttggctattatgtcaacgatccggagcgtttcggggtcgtggatttcgatgcgaacggaaaagccgtatccattgaggaaaaaccggcacagcctaagagcaactatgccgtgaccggactgtatttctatccggcaggcgtgagcgcgatggcaaaacaggtaaagccgtctgcccgcggcgaactggagattacgacgttaaacgacatgtatctgcagcagaaaaacctaaatgtacagctgctcggccgtggctttgcatggctggataccggaacgatggacagcctgctggatgcagcggcttttgtacagatgattgagcaccggcagggtgtgaccatttccgcaccggaagaaattgcatatatcaatcagtggatcacaaaagaaaaactgatggactctgccgcacgctacggaaagagcccgtatggagagcatttaaaagcagtcgcagaaggcagagtgaaatattaaaatcagcgtaactattctgagggggttctgaatagttataaatcagcatgaaagaggaaaaaacagtgggacagataacagtggaaaaaaatgtcggcggtatcgaagggctgtgtgtgattacaccggccgtacacggggatgcccgcggatatttcatggagacatacaatgaacgggaaatgaaagaagccggatttgacatccagtttgtacaggataaccagtccatgtccgtcaaaggcgtacttcgcggactacatttccagatcaactatccgcagtgcaaactcgtccgtgccgtgcgcggaagcgtatttgatgtggcagtggatcttcgcgaaggttccgtaacctatggaaaatggtacggagtggaactttccgaggaaaacaaaaagcagtttctgattccggaaggctttgcgcatggcttccttgtcctgtccgacgaggcagagttctgttacaaagtcaatgacttctggcatccgaacgacgagggcggcctggcatggaatgacccggcaatcggtatccggtggccggatgtgcagggggagtatcagggaaccccatcggcggaaggatattgtatggcagatgggacaccgctgacactttcggagaaagaccaggagtggccggggctggagaaaaaatagaatatggtgataagaaaaagtgatgatgtatgagaaaaaaagaatatatcatcactttttcttattaaaacagaattggattgactaccgatgatgacggagatagtatgaaaatatacttttgagataaaattgtaaaaaacaaacaaacttattaattctacatattattaatggggaataggaatgacaatgtttagaagagaaaagaaaaataattgggctttgatcaatcgtgtaaaatatgacggcccttgtgatggttcgccctggctgatctataaatatccggaagaggactttgtatatggttcacagttagttgtgaatcagggacaggaagccttattttttaagggcggaaaggcattggatttattcggaccgggaacgcatacgcttaatacagggaatttgccacttttgaacaaacttgtaaatctgccgttcggtggagatactccgtttacggcagaaatttattatgtgaataaaacttcgaaattaaatatgaactgggggacacagaacccgtttccggtagaagatccgaaatacgggattttgttatccatccggtcgcacggtacatatggattgcgtatcgatgatacaagaaggtttgttgcggaagtggtaggtgtagttccgttgggggcaaccgtaacttatgaatttgtcgcagcatattttagtggacttcttgtatcgaaaattaaaaatgtcatttctgcatatatgatccgcagaaaaatttcgtttttggaggttaccggatatttggacgaaatatccgaagattgcaaaaacgcggtgaaagatgagtttgaacgatttggtgcggaagtcataaatttttatgtggaaaccatcataccgccaaagagtgactatgaaaaactcagagaatacaaagaaaaatgccttatgggaaaattggaatga

SEQ ID NO: 134 - DNA, 7089 bp, unidentified
  source 1..7089: mol_type = unassigned DNA
atggataatcagatggaaagaagatggctttctttgttcgtagaaaaccgtgctggtgttcttgcaagaatttccggactattctctggaaaagcctacaatatacacagtcttacagttggagaaacagaagatccaacaatgtctcgtatgacgatctgtattgatgcagatgaaaagacatttgaacaggtcaagaaacagttaaatcgaagcgtggaagttattaaagttattgactatacagatacatcgatccgaacaaaggaaatcatgtttatcaaagtgaaaagtcttacagagaagcagatggcagagatcttccagatggcagaagtgttccgtttcctgatcaaggatatgggaaaagacagcgtattaatagaagcaattcgtacagagacaaagaatgattctattttaaaggtgtttaaagaacgttatacaaatattgaagtagtcagaggtggtccggtagcgatcgattgtatcagtatgcaggatcgttaatgatcagaagacaataatatagaagagaaaagagagtttggtgttttaacgcacacaccaagctctcttttttgcgtgtacagaaataagtttttaaaaaatatggggatttttcataggaataaaaagttttttctttcaatgaaaaaatacagggatgtgttaagttagacatgttgaaagtgaagtaaatttaacgaaaaatcaatttataaagagtgtaaatatatttatattgtaaaaattgttatttttttcacgaaaaaatcaggattatttcatagaaaatacaagaaaattatcaattcggtgagaaagtgttataagttatgtcggattgtgttaaaaaaaatacaatccgacaaggacattgtatacatcgaaaaaacacgtatttatgcggcttttggcactttgcacaatttattgaaaatctttttaaaaaatagcaattgaaaatgagaaaagattgtgatagtattaacatatcggcgagagagaagatcgctaaagtataataatcaagaatatggaggaaaattgatatggcaaagaaagtagttatcgcaggagcatgccgtacagcgattggtaaaatgggtggagtactcagcacagtaccagcagtagacatgggatcaatcgtaatcaaagaagcattaaagagagcaggagttccagctgatcaggtagaccatgtatacatgggatgcgttatccaggcaggattaggacagaacgttgctcgtcaggcttccttaaacgcaggacttccaatcgaaacaccagcagttacagttaacgtagtatgtggatcaggattaaactgtgtaaacatggcggcacagatgattcaggcaggagacgctgatatcgttgttgccggtggtatggaaagcatgtcaatggctccatttgcattaccaaaagcacgtttcggatatcgtatgaataacggaacactggtagatacaatggttaacgatgcattaacagatgcattcaatcactatcacatgatgatcacagctgaaaacgtagcagaacagtggggattaactcgtgaagaattagatgagtttgcagcagcttctcagcagaaagcagtagcagctcaggaatcaggaagattcaaagatgagatcgttcctgtagaagtaaaacagagaaagaaaacagttatcgtagatacagacgaaggaccaagacctggaacaacagctgaatctttagcaggattaagatgctgctctggaaaagaaggtggagttgttacagctggtaacgcatcaggaatcaacgatggtgcagcagcagtcgtagtaatgagcgaagaaaaagccaaagaattaggcgttacaccaatggctacatatgtaacaggagctcttggtggtgtagatccatctatcatgggtgttggaccagtagcttctacaaagaaagctttagcaaaagcagacttaacaattgacgatatggacttgatcgaagcaaacgaagctttcgcagcacagtctgtagcagtagcaagagatctgaaattcgatatgagcaaagtaaacgtaaacggtggagcaatcgctcttggacatccagtaggagcttcaggatgccgtatcttcgttacactgcttcatgaaatgcagaagagagacgctaagaaaggtcttgcaacactttgcatcggtggtggaatgggttgcacaactatcgttgaaagagactaattaattatagataattaggaaaggagaattcttagaatggaattcgttacatatgaacaggacggttttgtaggtgttgtaacaatcaatcgtccaaaagcattaaacgcattaaacagtgaagtattaaaagagatcgaagcaacttttgatgcgatcgacttagatgcaacaagagccgttgtattaacaggtgctggagataaatctttcgttgccggtgctgacatcggagagatgagtacattaacaaaagcagaaggagaagctttcggtaagacaggaaacgatgtattccgcaagattgaaacattccctattccagttatcgcagcagtcaatggattcgctttaggtggtggatgtgagatttccatgagttgtgatatcagaatctgttctgaaaacgcaatctttggacagcctgaagttggtcttggaattacaccaggattcggtggtacacagagacttgctcgtatcgtcggagttggaaaagccaaagaaatgatctatacagcatttaacatcaaagctgaagaagcttacagaatcggacttgtgaatgcagtatatccacaggaagaattattagcagcagctaagaaattagctaacaagatcgcatctaatgcaccaatcgcagtacgtgcatgtaagaaagcaatcaacgaaggtcttcaggtagatatggatcaggcaatcgttgttgaagaaaaagcttttggaagctgttttgaaacagaagaccagaaagcaggaatgggtaactttttagagaaagataaatctaagaaattaaaagttgttcctttccagaacaaataataatgaagtttaatatatttccagtctgcggtatcagccgcagaccggaaaattacatagtaaaataattttacaggaggaattataatgaaagttggagtaatcggcgctggaacaatgggtagcggaatcgcacaggcatttgcacagacagaaggatatgaagtatgcttatgtgatattaatgaagaatttgcagcaaacggaaaagctaaaatcgcaaaaggtttagaaaaacgtgttgcaagaggaaaaatggaacaggcagctgcagatgctatcttagcaaagatcacaacaggtgtaaaagatatctgtacagactgcgatttaatcgtagaagcagctattgaaaacatggaaatcaaaaaacagacattcaaagaattacaggatatctgtaaaaaagatgctatctttgctacaaatacatcttcattatcaatcacagaaattggtgcaggacttgatcgtccaatgatcggtatgcatttctttaacccagctcctgttatgaaactggttgaagttatcgctggtatcaacacaccaaaagaagttgttgataagatcaaagcaatcgctgaagaaatcggtaaaacacctgtacaggttgaagaaggtgctggattcgtagttaacagaatcttaatccctatgatcaacgaagcaattggaatttatgctgatggagtagcttctgtagaaggtattgatacagctatgaaattaggagcaaaccatccaatgggacctttagctttaggtgatttaattggattagacgtttgccttgcaatcatggaagtactttacaatgaatttggtgatacaaaatatcgtccacatccattattaagaaagatggttcgtggaggattattaggatgtaaaactggtaaaggattctacgattacagcaagtaagaaaaagagcttttcttttgcatccggagatggtgaactccggatgcaaaagttaactttatagaaatcatgatggaggaataaagaatggatttcacattaagtaagaaacatgaaatggcaagaactcttttcaaagagtttgctgaaaaagaagtaaagcctcttgcacaggacgtggatgaaaatgaacagtttccagttgaaactgtagcaaaaatggctaaagcaggattcttaggtattccagttcctaaagaatatggtggacagggatgcgatccattaacatacgttatgtgtgttgaagaattatcaaaagtttgtggtacaacaggtgttatcgtttctgcacatacatctctttgtatcgatccaatccagacttttggtacagaagaacagaagaaaaaatatatcccagatttagcatctggtaagaaattaggagcttttggtctgacagaaccaggtgctggtacagatgcacagggacagcagacaaaagccgtattagacggagacgaatgggtattaaacggatctaagtgcttcattacaaatggtagttacgcagacgtttatatcgtaatcgcagtaacaggtgttgttgaaaaacgcggaagaaagatgaaagaaatttctgcattcatcgtagaaaaaggaactccaggtttcacattcggaacaaaagaaaagaaaatgggtatccgcggatcagctacatatgaattaatttttgaagactgccgtattccaaaagaaaatctgttaggaaaacagggtaaaggtttcggtatcgcaatgcatactcttgatggaggacgtattggtatcgcttctcaggctcttggacttgcagaaggtgctttagaaagaacaatcgaatatgtaaaagaaagaaaacagttcggacgttctatcggacagttccagaatacacagttccagttagctgatatggcaacaaaagtagaagctgcaaaacagttagtatacaaagctgctatggctaaagctactcagaaagtatacagtgttgaagctgctatggctaaattatatgcagcagaagttgctatggaagtaacaacaaaagctgttcagttacatggtggttacggatacatcagagaatacgatgtagaacgtatgatgcgcgatgctaagattacagaaatctacgaaggaacatctgaagttcagcgtatggttatttctggaaacttattgaaatagggaggtacttaccgtgaagatagttgtttgtgtaaaacaggtaccagatacaaaaggtggagttaaattcaacccagatggtacattagacagaggtgctatgcttactatcatgaacccagatgacaaagctggattagaagcagcacttagaattaaagatgaatatggagctgaagttacagttcttacaatgggacttccaaaagctgacgaagttcttcgtgaagctatggcaatgggtgctgataaaggtatccttgtaactgacagagtattaggaggagctgacacatgggcaacttctactacattagctggagcattaagaaatcttgactatgatctgatcatcacaggacgtcaggctatcgatggtgatacagctcaggttggaccacagatttctgaacatcttgatattccagttatctcttatgcagaagacattaaaattgacggtgacagcgtagttgtacagcgtcagtatgaagatagataccacatcttaaaagctaaaatgccttgcttagttacagcattagctgaattaaacgagccaagatatatgactccaggtggaatttttgatgcatatgatgcagaagtaactgtttggggaagaaaagaccttaaagatgtagaggattctaaccttggtcttgctggatctccaactaagatcgcaaaagcatctgacaaagtaagaaaaggtgctggagaaaaagttacacttgatccagaagaagcagtagattatatcatggataaattagctgaaaaacatgtaatttagtgaaaaggaaaagtggtgaataaaatgggtttagaagaatatagaggcgtatacgtctttgcacagcaggtagataacgaattaagcggaatcgcattcgaattacttggaaaagcaaaagacttagcaaaagacttagatacagacgtaactgctgttcttgtaggttctgacgttaaaggattagtagatgatcttgcaaaatacggtgctgataaagttatcgtagttgacgatccagaattaaaagaatacagaacagaaccatatacacatgcattagcatctgtgatcaatgaatacaaaccagagatcatgttagttggtgcgacagcaatcggtcgtgaccttggacctcgtgtatctgcacgtgttcagacaggtttaacagctgactgtacagttcttgaaatcggtgatttcccattaagagcaatcccaggaaaagaacagaaacacaatcagttattaatgactcgtccagcattcggtggaaatacgattgcaacaatcgcttgcccagacaacagacctcagatggcaacagttcgtcctggtgttatgcagaagattgatcctattgaaggagcaaaagctgaagttatcgaatacaatcctggatttactccagacaacaaatacgttgaaatcatggatatcgttaaatctgttacagatacagtagatatcatggatgctaagatcttagtatctggtggacgtggagttggagaagaaggatttggaatgttaaaagaattagctgaagttctcggaggagaagtaagctgttctcgtgccgttgttgataacggatggcagccaagagatatccaggttggacagacaggaaaaactgtacgtcctaacgtatacttcgcaattggtatttctggagcaatccagcacgttgcaggtatggaagaatctgatatcatcgttgcaatcaacaaagatgaaacagctcctatctttgatgtagctgattacggaattgttggagacttaaacaagatcgttccagctttaacagaaaaattaagagcagttgttaaataa

SEQ ID NO: 135 - DNA, 11278 bp, unidentified
  source 1..11278: mol_type = unassigned DNA
tcatactatctcacctgccgtttcccgatagatttcaaagaacttatcctcaagtggcatttccgccgtcacatgggaaagcgtgtcacacaaaaccatttttccgttgatgataatgccgacacggtcgcagatcttttcgatcagtgaaaaaatatgtgttgatacaatgatcgtttttccttctgctttcaattcctgcagaaaatcggtcacaactttcgccgtgataacatcaagtccgtttgtcggctcatcaaaaataatgatctgcggatcatgcaccagtgaaatgatcagggatactttctgtttcataccggtggagagatttgcaaccttcacttccgcaaactcatccacaccaaatttctgaaacaggatacgttttctctcatcccgctctgcctgatcgacaccgtataattctgagaaaaaatcaaacagatagttcggagtaaaaaattcttccagttttaattcactcgtcagaaatccgatctttttccgaacaccgttcggatctgtcacaatactgcttccgtcaatcagagcatcacctttatccggtttgatcagcgttgctaacatgcgaagcgttgttgtctttcccgctccattgggccctaataatccaaaaacttcccccctgtaagtacaaaaggaaagatcatccaccgcaaccttaactttttccgttgtcttttctaatttctgctgtttttttgacaagtgaaatgtcttggataatccactgactgtcaataactcttccataaccctctccattaaaaatttctatatcatgatcgtgatctacactcgcttcgctcggcagtcttattatatcgttccgtcatccatactgtcttcaatatcatcatagatatcatcgtaaatatgatcatagatgtcattatagctgctataagatccaagtcctgtaaaaaaaatcaggatatacagaataatcgatgctgcaaaaccgattccacctgtgatcaaaccaacgatcgccattccttttttgtttccttttaccagctgtaaaataccgaaaatgattgcaaggataccggtgatccagctgatacaagtgcagaacagcaaaacggtgatgattccaagtatcaacgacgcaataccaaatccttcactttctgacttgttattgccatttggctgtccataattataatctgtactgccgtttgactgtccatagttataacctgcactgtcatttgactgtccgtaattataatttgtattgccgtttccatatgacgtatttgtataatacggattgtctgtcatagtcttttctggatttacacgctcttcatttccggtcacagtcttctctaaatttacacctgctgtaccatcagtcgtacttttctccaggctgacaggatttccctgatttacattcggctcatcatttccataattccagttattttcttcactcatactctcactacctcttaattaaatccgaccactttctgtgacagtcgatatgccgcaaccgaaatctttctgcctcccttgcccggcagattcattgcatttcccataattccggcgcgcagatgatggaataaacggatgtcttgatccttaatatatttccacagttcacgttttttcagaagattttcctcagtgccggagcggatcagcataatcgtggaaatgaccgtgatgatttccagataattaaacatgtaatgacgcagttttcggtttggaatcttccagagatcaaattcatctaccataatcttatttacattgatctgctggtcgatacggctgatcatcactttctcattgaccgactgatcttccctgccaataaagtaacggtaaaaatctacatccatataatacagtgtttttacacttggtaatggtttgtacacataaatattatccacataaaatgtatgtttcggcaactctaatccacattcacgcagcagttttgtacgataaatcacagaatgcatcaaaatgtactgaccctttctgaaacgtgacacatcattccaggtaaaaatctgattttggggcaggttcgtgtagtgcatcacttttttatgatgcgcaccttctttttcatatacataattggcaataaacatatccagggtctgattgccgccggtcagctcacgaagtttatctaaaatcttcttataagcctcctcatctacccagtcatcgctgtctaccactttaaaataaagtcctgtcgcattgcggattccagcattgacagcctctccgtgtcctccatttacctgatggattgcacggatgattcccggatatttcttctcataggcatctgctatgtcaccggtgctatcttttgacccatcatcaatgatcaggatctcaacatcatcgccacccggcagcagggatttgatacagttttccatgtaatcctgtgaattgtaacacgggatcgcaaatgtcagtaatttcatatatgaatcctccgattatctttttgtattttctgccatgatcgcatcagcaagttccatcgcttttttcgtcatcgcatcgatattatagtatttgtattctgccagtcgtccgagcagataaaaatgcggcagtccacctgcaagcgcacgatatttttcatagagttcctggttctttggctctaatatcgcatagtaaggaatttctccctccgctcctgtgtaggcaaacggatactctttcacgattgtggttccgtccgtgttcttttgtccggtcagatacttaaactctgtgattcttgtaaaatcctcactgaccgtgtaattgaccacgctgtgtccctgataagattctttctcataatgttcaaagtcaaatcttaaggaacgatatggaagccttccaaactgacagtcaaacaactcatccagtgcgcccgtatagataacctctccgtcaaacggtgttccatcaaaataaatctgattttcttcaaaacgcaatctctctttacagtcaacacctgtctcaaccgtgatgttctcatggtctaacatgcgctcaaacatcggtgtgaaaccttccttcggcactccctgatatttgtcctgaaaatagcggttgtcataagaaaccagcaccggcacacggcctgtcacttccgggctgatatcctccggtttttgtccccactgcttcatggtatattttaaaaatacattttcgtacacaaactgtgcgatctcgcggatgtccggatcttcattttcccgcagtttcatgatcggcacgcggcttccctctccgtatgcagcaatcagtttctgctctaatgcatctgctttttccttttcatataccatatgaagcgtatttaaattaaacggaaccgggatcagacgatccccgacctttgctaccacctcatgtccgaatacataccagtccgtaaatcttgagagatactgatatacttcttctattcctgtatgaaaaatatgtggtccataattatgtattaatattccatgttcatccggctcatcatagcagttacctccgatatgactgcgtctctctaaaaccagtactttctttcctgcttcctctgcaagctttctcgcactgacagcacccgcaattcctgcgccgatcacgatacaatcgtacatgtaatcctccttgttttccactttgttttaccatagccattctattatacacattttcctaccgcaaaccaatcaaatttttctttagatattcttaatttctgccaaagtatgtagttgttcatattttatttacataattctcacaaacagggcatacggcggtcacaattccccgatatactaaattcaaagttaaggcaacaagttaaaatttttcatagaactttttttcatacctgatgtaagtcaggtagccttgcttatccgataagcaaggttcctcccagcaaatagtgaattacttcacttttcatacacactctttttcataatgaatagccggtgctgttgcaccggctccctctttttataaatattttcttttaagctttcttttcatttccaagaagaatgttcatatatttcgcatacgcagcaaaagcggacggaatagcatatttttcttttgcatcttctgcttccacaaataataatccatctgcacgatttttttcacactgcacctgtggatgcatttccggctcctctacacggactgcataacctgtcatgtgccattcgatatgggaaaaaatatgtttcgcctcacctaacggctgaatacggatcggtgcataccccatctcttttaccatggaaagtacttcctcctgtcccatatttccttccacattcggaagctcatacagtcctgccaaaagtccctttgccggtcttttccggattgcaaccttctcatcatcccttaaaatcagaaccgtttttttctcgatctttcgcggttttgccttgctcttgactggtatctgtccgatcagttcctgtttttttgcctcacaaaaatccttccatggacattcggtacaaagcggtgcaccgtttggcacacagatcgttgctccaagttccatgagtgcctggttaaacgcaccggcaagattctgatgatatacctttgccctcagatcatctgcatcctccatccatggaaatacatttttttcatttctgccgtctgccccatgcatcaatttttctaataatttttccatctcattacggaatgactgtttcatgatatccgtatcatccgcagaaacgcgcgttaaaacacggagcacatttccatcgaccgccggaaccgggattccgtatgcgatagatgcgaccgctcccgctgtataatggccgatcccctttagtttcaacagtttctcataatctgccggaagttgtccaccataatattccacaacttccacagccgctttttgcatgttcctgacacggttataataacctaacccctcccaaagctttaaaagttcatcctccggacacactgcaagtgcctttgcatccggcagtgccgtggtaaaccgctcaaaatacggctttaccgcctccactctcgtctgctggagcatgatctccgaaacccacacccggtatggagtcggttcctctcgccatggcaatacacgggcatgatttaaaaaccattgcaataatggggatacaagttgctttaagtcgtaatcttttaacatgtatgtctcaaactttctttgttatatagcagccttcatgtctgcgcttatttttttcaaaccagtaccttatttgaggtcaaactggctgacaaatactgcgatcttctctaaacatttcttaataatgtctttggaataagcataagagcagcggatgtaaccctctgcacaacttccaaatgcgtctcccggaatgactgccaccttctgttcctgcagcagacggttacaaaattccatgctggtaagtcctgtttttttgatcgacgggaatacataaaatgcaccttccggttctgtcacatccagtcccatattccggaacccgtccaccatgatctttcgtctctcatcgtattctttacgcatcacatcgatctcttcgtcacgaaccggactcgtcagtgcttcaagcgccgccacctgtgacgttgttcctgcagacatggtcgtaaactgatgaatcttattcatatgaaaaataacttccgcaggacccgctgcaatacccatacgccatccggtcattgcaaatgcttttgaaaaaccatttaataccacacaacgctcatacatatccggcagcgccgcaatagatgcatgctttttgccataggtcagctctgcataaatctcatctgtaatcacaaaaatatcatgtgcggtcacaacctcacggattgcttctaaatcctctttttccatgatcgctccggtagggttgttggggaatgagatcagcagtacttttgttttatctgtaattttttcttcaagttcttccttcgtcaggcggaatttattttctgcctttaacgggatggaaaccggaatgccgccacacaattccacacacggaatataggaaacatagcaaggttctacaactaacacctcatcccccggatccaccagtgcgcggagtgcaagatcaattccctcactcgcccccattgtgatcagaatttcattttccctgtcataatgaagtccaaacttttccagatactctgcagatgccgcacggagttcgaccgtaccgcgattatcggtatactttgtctcacctcttttgattgaagcaatcgctgcctccctgacatgttccggtgtcggaaaatccggctcgccgacaccaagtgacaatgctccctccatcgtatttgcaatatcaaaaaagtccttgatccctgaatccggcatctcctttactaccttagataagtatgatttgcttgtgtccatggtttttcctcttttctgtgtctttgtcaaaatatcataccacctatcatagcactttttctaccaaatttatagtgaatttttcccataatctattgacaaattcagggaaaagctgtacgctattaataacgtatattgttaattttttatcaaactattcaggagggttccaaacgatgagcgattttaacaatttaaaactggaagttgctgaggagattgctgttcttacaatttcaagaccagcagcattaaacgcattaaacagcgagacattagacgagttaaacacagcattaactgagatcgaagcaagagacgacatcaaagtcgtaatcttaaccggcggtcctgacaagaaaggcaacgaattcaaatctttcgtagcaggcgctgatatttctgagatggtaaactttaccgcagcagaagcaagagctttcggtatgagagcttccgtaccattcttcaaattaatgaacatgcgtcaggtaacgatcgcagctgttaatggttttgcacttggcggtggatgtgaaatttccatggcatgtgatatccgtatcgcatctgacaacgctactttcgcacagccagagacaggtcttggaatcattcctggattcggcggtacacaaagacttgcccgtttagtaggcatgggacgcgcaaaagagatgatctttacctgcgattccgttgatgcagcagaagcttaccgcatcggtcttgtaaataaagtagttgctccggaagagttaatgaacacagcaaaagctatggctaagaaaatcatctccaaaggaagctacgctgtttccgttgcaaaagcagcaatcaacaacggttatgatatggacatcaagaacgctgttgagatggaagcaaacttattcggcgtaacctgctctactcatgacaaaacagaaggtatgactgctttcttagagagaagagctgctgatttaacagatttctaaaaaaacatatcaaaaaaacgggctgataattcagtccgttttttttgatatactcatattccaaatttaatgtgcaggtaatctctgattacctctacgcatttttcacgcccccatcaaaaccgacaccaccggcatcgtcaccgcagcaagaattgccgtaagcgcaactcctcttgccgccagatcataatttccatcatattgctgtcatactgccgacaggcgttgcgagcatgaccatacacacgcctaaaatcatcggatcatcaacaaactgctttatgatccatgtgcctgcaatcaaaaaaaacgtcagaaccctcttagttccaacgcctttgtcaataatttttatcatttgtatgtaatatagtcgatagctatatttttgtcaatatcccgctgtttctatatttcagtggagaaatgccatatgtttttttgaaacttctgataaaatagcttacattctggtatccgctctgcatagctgtctccgtcactgaaagatcggtgtcctgtaacaactgttttgcattctccaaacgtaaatatgttatatattgcgacaatgtaatatggaaatgttccttaaaataccgcgatatatatttttccgaaagatgaaactgttccccaaattcctttagcgatatctttcctgtaaaattctgctgtatatatgaaaccatctctttttctacaatatttctgccgcttgtatcattttctattacaaatcctttcttccacatttcaagaataaattgtaaaagaattatttttgtctttatctgcgcagttatttttgactcagtttcatcattttctgccatatatatatcaatcagctgctcacacagttcttttgccgagtcttttactcttgggtttatcatcaaatgaccgctatttaatggttcaagcaatttatcatctaacatgtcatcggtccgaaaagatatatattttaacggaaacaaaaatgtaaaataatccacagtgccggtctgtgagcccataagatgcagattgcccggcgatacaacgaacgcatcccctgcttttccaatataactctctcctgatatacttaccgtcagcaaaccactttttacatatataatctcaaattcatcatgccaatgtaccggtatctgaaatgaccgccccgcattctctatgtgatatatactaaatggattgtcctttgtaccatgtggtttattttcctttaattcaaagtacatactctctcctacaattctacaaggctcttgcttttccattttccgctcttccatctaagcaccattccaacagctctcgcgcactcatcacctgccatggcaatatatgctcctactgcctgaagtcccatatgtattccaagaaaatatgttccaccaactgcaaacagatacataaatatcgcacccattataaccggaaaaaccgcatctccactggtttttaatgcctgaccatatacaagatttgtcacccttccaaattcaaggaatatatctactattaacagccttaccacaagatttatcatttgcgcatcatccgtaaatatatgaactataaaatgtccggacatcgcaaatgtcacagagaagcacgtcgctgttataagaccatataccacagctttccgcgtacccctgtcacattcttcaaactcctttgatccaattctccagccagtcataatagcattagcctgtgcaagtgcagctcctatacaatacgaaaaatttgctatctgcatagcatatgaacgggctgtaacattcattccgactgcatccatctgattcatgaatcttactataagtgtcattgcaacattataaagtgctgtttcaaatgcagaaggaaaacctatcttaacaatctgcgcaagtatcttccgtggcggaatgcgctccggactctgctttgcctttatcagtacagcacccatgcctgctacaatgataaggttcacaacttttgaaataactgtggcaatagcaacgcccattactccccaatgaaatacaaacaggaacactgaattaaatattatattaatggcatttcctgcaatcgttcctatcaaggaatgctttgtatatccaaacactctgagatagctggaaaaaatgggaataagcgcatttaaaacacatgcacctccaacaattttaaggtatgtttctgccggctcaagcaaagccggagaaatacttacgattctaagtatttctccagaaaaaaaggcaataataaccgacataaggatacctgtcagtgcgttaaacataagtccaagctgtctggcctgatatgcaattccaggtctccccgctccgatattttgtgacataactgctaccataccggatgatattaccccgaacatgatgataaaaacacttatatacgtatttgctgttccgacagctcccacagcctggtcgcttacagacgataacataagtgtatcgaccatgcctgaaagcatataaaataaagtctctaagcatattggcacagccagctgtgtcaatgtttttctttcagttgccatgtttttctcctatgaaaactaatataacatacattatcaataatatggtatttttctgcatatttcttgtataatattatgcaaaaattgcattatttctacttatttacgaaatgaatcagcaagtctgttaattttgccctgatctgcattatcataggaaaatattttatgattccacattctcatctctgcataaaatgttgacgtttccccccaaatagactaggatagaatttgaatgataaatacgcaaaacaaggaggaaaatcctgcccaatgtgttgggcattgctcctgcaatggcagtcgcattttgctccgcaaaacaaggaggaaaatcctctgctcctgcaatggcagtcgcattttgctccgcaaaacaaggaggattttatgttagataaaatgattggttttatcggtgccggcaatatgggaagcgccatgatcggcggtattctggatgcatctttagtgacgaccagccagatcatcgcaagtgcacactctcctgagacacttgataagatccggacaaaattttccatagagacaacccagtcaaacgaggtcgttgcagaacgaagcgatattttgtttctcgctgtaaaaccaaataaattttccgaagtacttccgcagatcaaaggtcatttaaaaccggactgtatcgtagtttcgattgcagccggacagccgatcgcaaatatcgaggcgctgctcggtgaggtcagactgatccgcgccatgccaaacaccccggcgcttgtaggcgctgcgatgagtgcactctgtccgaatgacaaggtaacaccagaggaagtaaagctcgttgagtccttattcaacagcttcggccgtgcagaagttgtaccggaaagcatgatggatgccgttgtcggcgtttccggttcttcccctgcctatgtctatatgtttattgaggcaatggcagacgccgccgttgcagacggcatgccgcgcgcacaggcttataaatttgctgcccagtctgttttgggcgccgcaaaaatggtattagagaccggaaagcatccgggcgaattaaaagatgctgtctgctctccgggcggtacgaccattgaggcagttgcagctttagaacatggcggtttccgtgatactgtgatcagtgcacagcgcgcatgttctaaaaaatcatatgatatgagtcaaaaataa

SEQ ID NO: 136 - DNA, 14768 bp, unidentified
  source 1..14768: mol_type = unassigned DNA
ctacttaattgtcacaactcccaactcaacctgattattgattctggggatgaatacggggttgctcagacctgcgcagacaatcatttttgtgccgtcaaggtcaaattcgcctttgtcatatttcggaaaaagtccctgattcggagcgattactccgccgatgaacggcaattgaatctgtcctccgtgggtgtgaccgcagacgattaagtctatgtcggttttctttgcgtcctcggcaatgtattcgggctggtggtgcagaagaattgtgaaattgttctttgctttttcggcaaattcttcccacagcgttcttgacggaacatcgtcatcgggagtgtagaactcataataagggtagtcgctcattccgccgataagcacactcttgccgtttttggtgaattttatgtattcattatcgagcaatacagcgcctgttgaatttgtttcgcttttaaaatccgttccgaatttggcggcattgtcacgctcatggttgccgagacagcagtatgtgggtgcaatttttgaaagcttttcaagcacatctttcatcttcgttgtgtcgggatcgccacggttgaccatatctccgcaaactgcaataaaatcgggattttgttcctttacaagctctgcaaggtctgcgttcttttctccgtattccttgttgtgcaaatccgtgatgacaacaaatttcagctttgcgtcgttcttagcattgtttacacagtaattcgtgattgcaattgtgttgtcacagtaaacaccccatattacgagagtcacaaacagcgcaagtattattgctccgagaattatcgaaaaatttttcattcaattcaccgctcatattaagtatggtattattttaggctcgttttgtgcggttgtcaacaaatgtgtgtcgaacaagtctgattattactgttccttgtgctttgattgtcggattttaagttgatttaggaattgctttgtttgacattccttttgcactgttgtataataaatcataattgtatttatatgttactcgggaaatttacacaaagttaaacagaagaggtatgggttatgaagaagattaatttgcgtaagatgtttctggctctcgcagatgtgtttattatcgttgtcagcggtattcttgcaaattatattctctcacttgtcggttacataggtactgcttcaagcaaaggcttgttgagctatattgttattgatcttgtcatgtgtctgtttacgctttatataagcggaacatattcaaaattgtggcgatactttaacgcaaaggactatattgtgtgtggaactgccgtcttttcggggtttacgctcggctttgtaatctcgttgtttttgcagattccgcagagaaagattttttgtatagtacatttcgcaatagcccttgtcggaattcttgcattccgttttgttttcagaagggcttttcttgaccttaccgaggcaggaagggcagagggcggagagcgtacccttattgtgggcgcaggcaatgccggcagaatgattgttcgtgaaattcacaatgcgaaagagcagggtgatgttaataatccttcaaaaagcatcattccggtatgctttgtcgatgatgatttgaaaaagctgaatcagaagatcgaaggaatccccattgtcggaacctgtcccgaaattgttaaaatatgtgatgaataccgcatagacaatattattgttgcagttccgtcatgtgaggaagatgagaagaggaagattcttgattactgttccgcaacagagtgcaaaatcaagattatcccttatctcggcgagcttttgtttgatgacgggcatacacagcttatttcacaggcaaaggaaatcaagattgaggatcttctcggcagaaaacccattgagtttgaccgaaaggagattcatgaccttatcaacggaaagatttgtcttgttacaggcggcggcggttcaatcggcagtgagcttgtaagacagattgcaaagaatgatccgaaacaaatcatcattgttgatatctacgaaaacaacgcatatgatattcagcaggagcttgtgcttgaatacggcacaaagcttaaccttgtaacgcttatttcatcggttcgtgattacgacaaaatggagcttatcttcaagacatatcgccccgaactcgtattccacgctgccgctcacaagcatgttccgcttatggaaaccgttcccgaggaggctgtaaagaacaacatcttcggcacattcaatgttgcaacccttgcagaaaagtacaaggcaaagaagtttgttatgatttcaaccgacaaggctgttaatccgacaaatgttatgggcgcaacaaagcgtgcgtgcgagatgattattcagtacaaggcgcagcacagcacagataccgaatttgtaacaacaagattcggtaatgttctcggctcaaacggctcggttattccgctgtttcgccgtcagattgaaaacggtgctcccgttaccgtaacacatcccgatattatcagatattttatgactattcccgaggctgtttcgcttgttcttgaggcaggtgcaatggcaaagggcggtgagatttttgttcttgatatgggtgctcccgtcaagattacaacccttgccgagaaccttatcagaatgtacggtaaggttccgtacaaagatgttccgattattttcacgggacttcgtccgggtgaaaagctttttgaggagcttcttatggacgaagaaggtcttaagtcaacacagaacaagaaaattttcataggaaatcaaattaaaatagacgaaacagatatgctgtcaaagcttgaggttctcaaaaagaccgcagaaaacaatgacagtgaaaagacagttgaacttttggcagaacttgtacctactttttgccacaaggtcaatgattaaccgaaaaggagaaattttatgtgcggtattgtaggttatgtaggacctaaggattgcagtgaggtgcttgttaatgctctcacaaagcttgaatacagaggctatgactcggcaggtattgcggtttttgataacggagaaataaagaccgtaaagaccaagggtaagcttcaggacttaaaggataagcttgcagaggtcggcactccgaaaggtcatgtcggcataggtcacacccgttgggcaacccacggcgagccttcggatgtaaactcacatccacacagcggtgcaagggttacaatcgttcacaacggtattattgaaaactatatggagcttaaagacttcctcatctcaaagggaagaacttttttaagcgacacagatacagaggttgttgctcagctcctcgactataaatacaacggaaatcctcttgaaacaattgacagcgtaatggctgagcttaagggttcgttcgcactcggaattatgttcaaggatttccccgacagagtttttgcggttcgccgtgaaagtcctcttatcgtaggcgttgcagaaggcgagtgctttattgcgtccgatgttcccgcaattcttcagtacacaagggattattatcttcttgcccatgatgaaatcgtaacactttcacctgacggtgtttcgttcgttgacgaacaccttgatccgattgaaaaggaacttcagacagccgactgggatatggaggctgccgaaaagggcggttatccgcactttatgattaaggaaatcaacgaacagcccgaggctatcagaacaacgattatgccgagaatcaaagagggacttccgttccttgaggaatgcggcatcacaacggaaacaatcaagaatttcaaaaatatcacaatcgttgcctgcggtactgccatgcacgcaggtatggtcggcaagtatgttattgaggatctcgcaagagttcccgtaaatgttgacattgcgtccgagttccgttacagaaatccgattgtaggcgagggcgaccttgtaatcatcatttcacagtcgggcgaaacagccgacagccttgccgcaatgcgtcttgcaaagcagaagggtgcaaaaactcttgcaatcgtaaacgcaaagggcagttcaattgcccgtgaggcggatatgctcatctacacactcgcaggtcccgaaatttccgttccgtcaacaaaggcatacatcacacagctttccgttatgtatctctttgcctttgagcttgctcttgcaaaggaaacaatcagcacagccgagtgcaagcgacttgtttcggctcttacaaaaatgcctgaggcagttcagtatgtaattgacaactgcgaggatacctgcaagttcgttgccacaaagcttgttgcaaccgacagcttgctttacataggcagaggtcttgactatgccctttcaatggagggttcgctcaagctcaaagaggtttcgtacattcactcagaaagctatgccgcaggcgagttaaagcacggcacaatttcgcttattgacgaggatgttcccgttatcgccgttgcaactcagacaggtattatccccaagacaatcagcaatgttgttgaggttaagtcaagaggtgcaaaggttattcttgtttgtacagacgcctgtgcaagagaactcaaggacggtgttgcggattatgttatcgaaattccgcatacagacgagcttcttatgccgattacagcggttgttccgctccagattcttgcttattacacatcaatcaacagaggtattgatcccgataagccaaagaaccttgctaagtcggttactgtagaataaacggcggtcttgtatttaattgaaaatggaaaattgaaaatgtaaaattatggtcgggaaggcaatttgcaagatgcaaatcattgtcacccgaccattttttatttatatgaaagtatatgcttaattgtgggagcgtccaatgaacgctcctacataacttactcttgttttcaaatttaaacggtaaaaaccttgtatttttttgacagattatgtataattaattagatatacattctaaaaagcagtattgatgaatctaatttagtttcgggggaatatacggacatgatgaaaactgtttttaaaagagctgtaacgcttgcaatttgtgccgtaacggtattttgcggtatttttgcctgttcaggcgcaacaaaagattacgagattccgcagattgacgatatgacgctttcaatgcctgacggtatgagcgctgttacaagggacagtaaaagcacagataaatatttttccgttttcggtcttgattatgacacaacaatgaaaacctttcagaacggaaatatctatcttcagggtatggataatatgtcatcggttattctgaccgtgacaatgacaaaaaatgagagcagcgagaatgtcggcaactatgctcagctttcttcaagcgagctttcaaatatacgcaacaattttcttaattccgacgagtatctgagctgtactcccgaccaaaaagaaaaagctgtgtggcttgtgtttgacgcaactgctcagagcagtaagggcgatgtgaaaacctttattgccaacacggtttatgacggtatgaacattaatatcacaatgcagagaacagagggtgatgttacaaccgttgactacgatactttttccaaaattgtatcttcggtaaaattcagcgacctgccgttttcaaagggatttattccgtacataatcatcggcggcggtgttgttatccttattttgattgtactcatcataatttttgccgtgagaatcagaaagcataaaaaggctaagaagaataacgctattcttgaggagcttgcagtcaagtataaactcggtgaaaagggtacggactacgacattgacaattttgacgattctcccgaaaagcccgataaacgctcaaagaaaaagcagaaatatgcggaagaggttgaagaagaaccggctttgccgggcagaagatatgctcccgagccgataatcgaaaatatggaagaaccggaagaaattacaagtgagtattcaaactttggttatgacacggatgatgccaaggaaaaagaaattgacgagataatcaactccgcaaaggcttacaagagtgagcttgagcgtgaggcatataaaaacaactacggttacgaggaaaacagcacggaggacgaaaaaaaaaaggagcctaccgcagcagatacctcagagactgaacccgaaaaaattgacgaaaacgaaaaagataacgcagaaacacctgaaaaacacgaggacataagctcttcgtcaggtcctacactcgttattcccgaacccgaacacgatctttttgaaacaagcgagcctgacgatatcgaccgtgaggacgatgccgatgttgaagaaaccgaggaggtttccgaacaaaagcatccgcttgaaaaaaaggttgacaagtacgcaaacatcattttcggcagtgacgatcccgaggagaaaaccggggaagaggttgatgatgaggagcttgtaagggcaaaggctaagaaaaacaagtttgacagcggttatgacttttttgacgaagctcccaaaaagtcaatgggggttatcaaaagctcagacctcagagatgccgaggacgttgatgttatcggcgaggttgaaagaaaagcagaaaccgtaaagcagaacgctcttgaaaaagagaataataaagaaaccgagggcgaaccgaatgataaacggtcaacggaagaggttcttgccaatgtaggcaaaaacatcggtaacgctctcaggggctttgcaggcggagttaagaattttggcattcactgcggatatttctgcaagaatgtttcaataatgataaagcataagcgtgcaattgccaaacgcaaaaaggcagaggaagagagaagagagagagaaagacaaaaggcagagcgtgcaagaatgcgtgccgaaagaggcgaaagtgacggacttgttcaggttcacagcagaaccgaccgccgcccccagcagaatcgccgccctgcaaacagaaacaagagaagataatttcttttcttaacggaggaaaaacatggaaatgctaattaaaaacgcagtggttgtttcccctgccgacaagcttaacgaaaaaacagatattctcataaaggacggtgtgattgccaaaatcggcagcggcattacatcagacggagagattattgacgcagacggtctttgtgccgttccgggatttgttgatatgcatgtgcatcttcgtgatcccggtcagactcacaaagaggatattatcacgggatgcaaggcggctgccgcaggcggtgttacaagcctgcttgcaatgcctaacaccaacccgacaaccgacagccccgaaattgtaaagtatattcttgacaaagctaaagacgccgacagccgtgtttatgttgcggcaagcgttaccaaggggcttaaaagcgaagaatccacagacattgacgctgtgaaaagtgcaggtgcaatagcacttaccgatgacggcagacctgttgaaaacacaaagtatctgagtgacgcaatgaaaaaagctccaaagctcggcatgacaattgtcgcacattgcgaggacttgtttcttgccgacggcggtaaaattaacgagggcgaggtttcggaaaagctcggtgtcaagggaatccctgccggtgccgaggactgcggaactgcaagagaaattgcacttgccgccgctcttaacgagcctattcatatctgccatgtcagcaccaaaacaagcgttgcacttatccgtgatgccaaaaggagaggtgttaaggtgaccgccgaaaccgctccgcattatgtttcgctcacggacagggagcttttaagaggtgacgctgattacagaatgaatccgcctctcagaactcaggctgatgttgacgagattatcaatgggctttgtgacggtacgcttgatgccatagcaaccgaccacgccccgcacacacccgaggaaaaggctgattttgtaaaagcccccaacggttcaatcggcatggaaacctcgtttgcggtctgcaacacatacctggttaagacaggcagaatgacgctttcacagcttgttgagaagatgagtgttaatcctgcaaggattttgaaaatcaacgcaggcacactttcagtcggtgcaaatgccgatgttgttcttataaatcccgatgaagaatggacagttgatgccggtaaacttcacggcaaaagcaaaaacaccccgtttaaaggcagaaccctcacaggtaaagtcaaaaagacaattctcggcggtaaggtagtttttgaagattgagtttgttttaattgtagatgttgatacgattaaaattgtgcaaacggtagctgtactacgctcgggcataaatgttttttatttgtcaaactgtctgcacgaattggggacggcggctcgccgtgttcgctcaccaaataaatttaatttaatataaactttaacataaaggagtaaaattatggcacagaaaggcgacctcctgtcggtaagacaggatatcagagtagtagacgcaacaatccgtgacggcggtctttgtaacgatttcagatttgacgacaaatttatcaaggctctttacaatgcaaatgttaaagccggtgttgattatatggaattcggctacaaggcatcaaaggaaatctttaacgaagaagatttcggtaagtggaaattctgtaacgatgcagatatcagaaaaattgtaggcgacaacaagacttctcttaaaatcgctgttatggctgatgtcggcagaacagattttaagaaggatattatcgcaaagaaggacagcccgattgacctcatcagagttgcaacatacatcaacgcaattcctgcggctgttgaaatgattgaggacgctgcaaagaagggctacgaaacaacaatcaatattatggctgtttcaaaggcaagaaccgaggatattacagcggctcttgaaactctcggcaaaactcccgtaaacgctttctacattgttgacagctacggcgcactctatcccgaggagtcaagacgacttgcagacctttactgctcaattgccgacaagtacggcaagtcggttggtattcacgctcacaacaaccagcagcttgcttttgccaacacaattgaggctatgactcagggcgtcagctaccttgacgcaaccgttgacggcatgggcagaggcgcaggcaactgtgcgcttgaacttctcctcggttttctcaagaacccgaagtatcaggttgctcctattctcaaaatcattgaggagtacacccacaagtttaaggctgagggcgttaagtggggttacgatattccgtaccttctcacaggtcagtacaacacacatccccgtcctgcaattcagttcgtaaaagaggacagacaggattattacaagttctcaaatgaactttatgatattatcaacagctaattaaatttgtagcggcgttcattgaacgccaatcgaaccgattgccaaatcggttcgaccatacaaacgatttgaattaaagtaattaaccacgatataacaatacatttgttgtttattcgttttggtttcacaaccaaaacgattggcggtcattgaccgccgctacggttaagcaatgacattgtttaaatcaaaatatgaacgaacaaattgtttttacattacaaaaaatgaggagaatcactatggcatttgacagacttatcgaaaatattgtaaaaatgcagaatcctacggttgcaggtcttgaccctaagcttgactatgttcccgaatcaatcaaaacaaaatgctttgaaaagtatggcaagacgcttgagggtgcggctgctgcactttttgaattcaacaaggcgcttattgacgcactttatgatattgttcctgccgtaaagccacaggctgcatattatgaaatgtacggctggcagggtgttaaggctctttgtgacacaatcgcttatgcaaagtcaaagggtatgtttgttatcacagacggcaagcgtaacgatatcggaacaactatggaggcatatgctacggcacacctcggtcatacagatgttgcaggcgaaagtattgacgcattcggtgcagacgcactcacggtaaacggctacctcggaacagacggtatcaagccgcttgcaaaaatttgcgattcggacgacaagggcatttttgttcttgtaaaaacttcaaacccaagctcgggcgaacttcaggatatgaagcttgaaacaaatgagagcgtttatgagcatatgggtaagatgtgcgaaggctggggcgaagaccttatgggtaagcatggctattcggcagtaggtgcagttgtgggtgcaacatatcccgaacagctcggtgaaatgagaacaaaacttccgcacacattcttccttgttcccggttacggtgctcagggcggcggtgccgatgatgttaaaaacgcatttgacgaaaacggtcttggtgcaatcatcaactcaagccgcggcattatgtgtgcatggaaaaagcagggacttacagaagatgactttgccgttgccgctcgtaaagaggctgagcgtatgagagatgaaatcgttggttgcatcggcaaaattaagcttggctgattcatttgcacaacagaatcacgaaatttttcgttttttatgctttagtgctatgaatttattgactttagcgtgctaaaagcgtataatttaaatgtatttatttttacaactatatttttaaattttctttaaaaagggagatatcagaaatggcaagagtatataatttttcggcaggtccttcaatgctgcctgagtctgtgcttaaaaaagcagcggcagaaatgctcgactacgaaggcagtggtcagagcgttatggaaatgtcacaccgctcaaaaatttacggtacaatcatcgagggtgccgaggctcttttgagagaggttatgaacattcctgacaactacaaggttcttttccttcagggcggtgcgtcaacacagtttgcggctatccctatgaaccttatgacaaagagcggtaaggctgattatgttattacaggtcagtgggctaaaaaggctcatgcagaggctgcccgttacggtcaggctaatgttgttgcttcatcggctgacaagaccttcacatacattccaaagcttgatccttcaacattcacaaaggacgccgactatttctacatttgcatgaacaacacaatttacggtactgtttatcacgagcttcccgacacaggtgatgttccgctcgttgcagatatttcttcctgtattctttcaagaccgattgatgtttcaaaattcggcgttctctatgcaggcgcacagaagaacatggctccggcaggtcttacggttgttatcgttcgtgaggatcttatcggtcacgctatggatatcactcctacaatgcttaactggaaaactcacgctgacaacggttcaatgttcaacacaccgccttgctacacaatctacattgcaaagcttgttcttgagtggattaagaacgaggttggcggtcttgataagatgtatgaaatcaacaagaagaaggctgaccttctctacggtttcctcgattcttcagagcttttcaagggtactgttgttcccgaggatcgttcgcttatgaatgttccgttcgttacaggtgacgctgaccttgacgctaaattcgttaaagaggctactgaaaacggtcttgttaatatcaagggtcatcgcacagtcggcggtatgagagcttcaatctacaacgctatgccttatgagggcgttgaaaaactcgttgagtttatgaagaagttcgaggctgaaaacaagtaattattgaatattatgatataacgggcgaacgctgttcgcctgttattgtaaattcttaaaataaaaaattaaaaaggattgattttgatgtataacattcttacattaaacaaaatcgccgctatcggcacaagccgtctcggtgataattataaatacggtgacgatgttcagaaccctgacgcagttcttgtaagaagtgccgcaatgcacgatatggaatttgccgacaaccttcttgcaattgcaagagcaggcgcaggcacaaacaacattccgaaggataagtgcagtgagcagggcattgttgttttcaatacaccgggtgctaacgcaaacgctgttaaggagcttgttatcgcaggacttcttatttcaaatcgtaaggttattgagggttatgaatgggcaaagactctcaagggtaacggtgcagctgtcggtaagatggttgaaaagggcaagagtcagttcgtcggtcccgaaatcaagggtaagactctcggtgttatcggtcttggagcaatcggtattcttgttgcaaatgccgctgttgctctcggtatgaatgtaatcggctttgacccgtttatgtctgttggcaacgctctcaagcttgctcctacagttaagctcatgaagagcgcagaagatgttatggtaaattgcgactacctcacaatccatgttccgcttactgacgacacaagagatatggttgatgccgatatgattgccaagatgaaagacggtgttcgtattctcaatttcagccgtgacggtcttgttaattcaacagcagttcttgaggctgttaagagcggcaaggttgctaagtatgttacagacttcggaacagacgatatcctcggtgaagagaatattatctgcctcccacacctcggtgcatcaactcccgaaagtgaagaaaattgtgctgttatggcttgtgatcaggttaaggagtatctcgagaacggtaacatcatcaactccgtaaactatcctgcaatttcacttgcaagaacaaatgctgacgatacccgtttctgcgttgctcacaagaatgttcccgagcttctcaagaaggttctcacacagatcagcggcaatgttgaaaatatgctttcaaagagccgtggcgactatgcttacacaattattgatgttgcaggcgccggtgcagatgaccttgcaaaaatcgcagcagttgacggcgtaatcagagttcgtgcaatctgattttaattaaaatttaatcgttgaaaatttaatctatgaaaaaagtccgaacacgcaaaatgttcggactttttgtttgtgtgaatctaaatatgtagcggcgttcagtgaacgccaatcgaaacgattgcaaaatcggttcgaccgtatttcaaaatattggtgtatggttgatttggctttgcagccaaatcaaatggcgatcactgatcgccgctacgtatcgctatatattaaacttttaccaaatgatatttctttgcattggtaattataaatgttacggaaattgcaacggcacacaattctgcaacgggcaatgccgaccatacaccgtttatgcctataaacatcggcaaaatcagcattgcggcacactcgaaaacaagcgttcttgcaactgaaattacggctgaaatcttgccgttgttgagtgcggtgaaaagtcccgatgcgaaaatattcattccgcacaacagataatttattgcaaaaattctgaatccgctgagtgcaatctgctgaattttttcgtcgcctgccgagaaaattccgacaagcggttctgcaaaaaattcagatgccgtaatcattgcaaccgaaattatcagcgtgatttttatgcataatttgaacagcttttgcagtttttcgtggttttgtgcgccgtagttaaagctgatgacgggtgaaactcccgaagtgaatccaaacgaaaccgcagtgaaaataaagtgaatgtacaaaatagcacttatagccgcaacgccttttgcgcctgcaaagtgcatcatctgaatgttgaacagcgctgttgtcacggctgttgaaagatttgtcacagcctctgacgagccgtttgccattgcaaagaggatttcactgaccttgaattcaggcttgccaaagtgcagagtctgctttttgttgaaaaagagcaaaagcggaattgcacccacagccattccgataatggtgccgagtcctgcaccgattattccaaaatcccacactgccataaaaagaatgtcaagcacaatgtttgtgcaacccgacagtatcgagaaaacaagcatgatatgtggcttgtccgctgttacaaggtacgattggttgagcatttgccagcacattacaaagccgtacggaatcataacgctgccgtagtcaatgcagtaggggagaattttttcgtttgagccgaacatcatatacataggttcggcaaaaattgtgaacagcacagcaatgataacagaaatgaccgttgccgtgattgcaacaccggacataagtcggtttgcttcctcctgtttgccttctcccattttctttgcgattatagcatttgagcctgttgaaaacattaagcccacagccataaatacgagtgtgaacggatatacaatattgattgcggacaatgcgtcacttccgacacagttcgcaacaacgattccgtcaacaaccgtgtaaagtgacataaaaaccatcataagaacggttggcagagtgaacttcagaatcgtttttgctttgataggttttgcataaattgatgttgccat

SEQ ID NO: 137 - DNA, 20395 bp, unidentified
  source 1..20395: mol_type = unassigned DNA
atgaacatcacgctatccaacacgcgcctcttccgcggcattggcagtgatgagctgccgctgctgctgcaatgtctcggcgcggtgcaaaagcactacgaccggggcgagaccattctcgctgagggcgcgccgaccgagcagctcggcatggtgctctccggcatggccatgatcggctatgacgatgtctggggcaaccacagcctgctcggtcacgtcagccccggtgaggtgtttgccgagccctatgcctgcatcccgggcgagccgctgctcatcagcgtgaccgcctcggaggacaccgaggtgctgtttttgaacatcggcaaggtgctcacgacgtgcacgaacgcctgcccgtttcacgccaagctcatccagaacctgctgaccgtgtgcgcggctaagaacctgcagctctcgcagcgtatcctgcacacggcgccgaagggcatccgcgcccggctcatgtcgtacttttccgagtgcgtcaagcgcgccgggcaatacagctttgacattccctacaaccgccagcagctggccgactatctgggcgtggaccgcagcgccatgtgcagcgagctgtcacggatgcagcgcgaggggctgctgagctatcacaagaaccatttttccgtgcacgaagcactggagtaaatcgacgaaaggcggacacaacatgacgagagaagaatacgcaaagcggatgaaaaagcaccccgactgggccccgggccgggacgcgatcgaggcggcctttgccaagcgctatcccaagacggagccggtgtgctttgagagcgagctgcacgaccgcgcggccttcggcggcgacgaatatctcgacggcttcgccgtctatgacacgggcaggggctatcagcacatcgtcacctacggcatgagcgagctgtatccgagcatggcggccttcggcgccgagtacagcaagtggggctatgagatgacgatgaaggtgcgcgagagctatgccgagaccggcacatgggcgctcgatctgctggcccagctggcgcgctacacgttccagaccggcaatttcttcgagccgggcgcctacatccccggcgacggcagctccctgcacccggagctgggctcggccatcacggggctggccatcgtcagcgacacgaccgtcgccccgatcgaaacggtacacggcagggttgcatttttgcagctcgtcggtctcacgcagccggagctggacgcgatcacgcgcgacccggacacactgaccggcatcctggagcggatgcgcgcggagaatccggagctggtgctcgacatgcgcagaacgagatccttcgtgtgattgcgccagcgctggcagttttctccgtggatcggcgcaaatgtctgcaaagcccacgaacgaatcaggagaatagatacacatgaagtacattttctgcacggacatgaccgggcgccaaaaacatactcggcccgacggtcagtgctttctgtcagcagagctcccgcaggtcatgcgcgacgggcttgaacaaacggcacacacactgtcacaggcagaacggcggcacaagctgccgggcattttgctgattatgcaatatatctgcctggtgatcggcatggtctgctgcggcgggcttgtgcgtgcacttgcgggcagatcggtcagtctggcacaggcctaccacaatgcgcctggcattttctggaccggtgcggtcacattgtgcatagccggtctgctcgcgctctggcagcgtgttcagacggcttccgccgaccgcagcagcagtgtccaggcagcccgaaggaaaatgaacgatcagatccgcggtgcaaaagcttatctcggcattcccggccaggttcagcccgttgacattcttctgttcgactaccgcagggaagcgcagggcctgaagatcctcaacacggcacataataccgagttctggctctaccgggatcaaaacagcctctgcatcgccgacgagtatcaggtatacgcacttgcactgcaggaactgcagcgtatccgcgttgtgcagcgtgtgatcccgatgaccggctggaacaaaggcggccaaccagatcaggcacgttttcggcgcagcggtgtgatgtgtcacgagggcgcagctattggcctgcagttttgctgcgcattggaactgacccataacggcgagcaatacgcattgctgtttcctggctatgagcttccggaaatccagaatctgacaagattgtccgcacctgagctgcctgcggcagcacctgaaaagaagcgaaaagcagcacccaaaaagcatccaccgaacggcgaaaaaatccgccccctcttttactggcggattccgaagggagaaaatgtggcgctgtggttcacgcctttggcagacgtagagtttcaggcagcgcacccacggctgtacacttttctggtcatccttgcgatcgcgctgctggtagccccgatggcaggatatttgtctctgacaacgcactatttccccgacgcaaacagcccatggctgcttttgggtggcgttggtggtttcctggtcgggtgcagtctgttcaacatccttgcagcgtggctgcatcagtactttggacaaattgtaacgatttgtttggcagtgctcggtttcgcactgatggctatcagctgccttctgctgtgatcgatcgcttttcatcggtcggacaaaaaaccgtgaccttgaacagaggtctaaggaacgcatccgtgactttgagcagacgcacggtgaaattgcctgcaggatatatcaaacccttgaaaaaaacagccgcaccgtgacgccacggtgcggctgtttggttctcacagcttgggatcagttatcctttttcgcgatcagctccgcgcaggcttcgccgaggatgcggatgcccttttcgatcacctcatcgctgctgttggagtaattgatgcggaatgtgctgacattgcgctccttttcatagaacgggtcgcccgggcagatagcgacgcccttcgcgagcgcaacacggtaaagatcgactgcggacatgccattcggcagcttggcccacaggaacatgccgccctccgtcggcgtgaactccacgccctccgggagatatttgcgcatgcagtccatcatcagctccgccttgtgcttgtagagcactttcgtcttctcgatgtgcgcgtcgatgtcgttgtccgcgaggtactgtgccagaacgagctgcgagaagatgttggtgtgcaggtcggcagtcgccttgtagctcaggagcttttcacgcagcgccttgttgcgcacgcacacccagccgatgcgcatgccgggggcgacgatcttggagaatgtgccgagcatgcagcactgctcgcccagctccttgccgaaactgtcggtcgcggtgccggaaaaacgcagctcacgatacgggttatcctccagcacgatgatgtccgtgccccggaagatctccacgacgcggtcatgcactttctgactgtagctcaggccggtggggttctggaagttcgggatgacataagcaaacttcgcatccgggttggcctgcacggtcgccgcaagctcatcacagtcgatgccgtcggggttgatggtgacaggcaggatctcgggatcaaagaagtggaacgactgcagcgcgacgaggtaggtcgggttctcgacgatcaccttatcaccggggtcgagcatgcacgcgccgatcatcgtcagcacctgctgcgagccgttggtgatgatgatgtcgtcggccgtcacgccgtagacgcccatcgtctcatagcgctttgcaacccactcgcgcagcggcagatagccctgcgtgccgctgtactggagcgccatgacgccgtttttctccagcaccttgtgtgttgccttgtccatcgcctcgaccgggaaagagaccggattcggcagaccgcccgcaaaagaaatcaggtcgggagatgccgctgccgcaagaatgcttgccgtaaactcgccctgaaagtcgggacgcatgatttttttggaaagtctgggattcataatgatttctcctttcatgggcacttgtaatggtcggtcgatccgacaggcaagccctcataatgtgtcgattatagcgcacgcgattgcggcatgacaaggcgttgcaaaaaaatctgcgttctaacggaaagccgcgcttatgcaaagcagggttctgtatagaacgctcattcatctttgatatactgctcttccacctgctgctgcgcccggatcagcacttgccgtgcacgtgcgtatgcaccggcatccagcagccgaaccgcattcgtaatcgcgtgaaacaggggaaaacataatcgcatcgtatccataattgtcccttctgttgtgcgtcaaaaatgcgtcatttctgcattttatattaatatgacgctagaatttgtcaatccttcgtcatggagggtcggcaaaatgaaagacaacctgagccggtacacattgcgcatcgatcaggcgctgctggacaagctcggctacatcgcagaatacgaaagccggacaaaaaaccgcgaactcgagcagatgatcaaaaagcgcatccgggactttgaacaggaacacggcgagatcgacctgcacgacatatccaagctctgacaaaccatcagccgcaccgtggtgtcacggtgcggctgattctttcctgtatgcagggtcaatccagcacggaccggaggaacgactccagcgcggccagatacgcttccctgtccaccatgtagctcagcccatgtcccgcgcctggcacgaccagcagatgcttattgtgcgccgcgcagtgcgcatagttttcgtgccccatgtcgcaggggacgaagcggtcgtccccgccatgaatcagcagcacaggaatgtcgcaatgcgccagcgcatccgtgaccgtggcggactccaggtcgaaaccgccgaacagtttcccgcccaggcggatcaactggtagaccgggaaaatggggagatgctggtcgcggatgaccttgcgaatgatcgcggcgggcgagctgtacccgcagtcggccacgatgccgacaacattgcgcgggagattcaatccgccggccatcagcacggtcgccgcgcccatcgacaccccgtacagcaagatcttcgtgtccgcgccgaagcgcccgacggcgtagttcacccacgcacggcagtcatagcgctcctgaatgccaaacgtgaggcacctgccctcgctcttcccgtgcgcgcgctgatcgaccagcagaacgtgatagccgccctgcacggcgatctgcgccccgccgcagaagtcccgctccgcgccgctcttgtagccgtgcatcatgatctgcaccggtgcgcccggccggccggcgtagtatttcccgtgcaggtgcagcccgtcgtcggatcggatccatacgtcctcatatgggagcgcgagcacggtccggaccatctgcgtcatcgcttcccgatagggggcatactgctccgtgtccggcaggcggaagagatccgcctccgtctgtttgggcacggaaaagcagaggcggtagcacacataggatgcagccagaatgaaaataagaaggatcaagacgctccacacaacgaccatgttcgtttcctccggacattttttgacgcatggagcagtatagcacaggaaaagaaggctgccaaatgaaagtacaaaaaatcgccgctgcaatatgcagcccacggcgacgttgcttggtcagccaattttgaggacgtaacgaaaaaaccgacagctcgaacgagctgtcggtttttgagcggagcggactttgctccgacgtggcggagagtaagggattcgaacccctgtggcgttgccgcctaacggttttcaagaccgccccgttatgaccacttcggtaactctccacatatgcagatagagaaacaagacgccgaaatcggcgtcttgtctttggcggagaaggagggatttgaaccctcgcgccgcttatcacagcctactcccttagcaggggagccccttcggccacttgggtacttctccaagccgaattccactttccatatggacgcgcggccagcgcgctgcattatagtagcatattcggcagcggatgtcaacttgttttttggttgacaccgtacgcaaaatgcgttataagtgtgccagagcaaaggagagacatgatatgcgctatacatccatacttttcgacctcgacggcacgctgctcgacacgctcgccgacctgaccgccgccatgaaccgcacgctcacccgccacggcctgccggagcgcacgcggcagcagatgcgcaccgcgctcggcaacggggcccggcggctgatggagctgtccgtgccagccggaacggacagtgcgctgttcgaaacgctgctggcggaatacaacgccgactacgccgcccactgccgcatcgagactgccccctaccccggtgtcgccgcgctgctgcttaagctgcacgcgcaggggcgcaaactcgccatcgtatccaacaagccggacgaggccgtgcgcgcgctgcgggcagatttctttgccgacgcagtcccgatcgccgtcggtgagacggcggccatccggcgcaagccggcgccggacatgctgctggccgccatggaaaagctcggtgccgaccctgacaagacggtctttgtcggcgattccgaggtcgacattgccacggcgcgcgcggcaaatctgccgtgtatcagcgtgctgtggggctttcgtgaccgggacgtgctcgagcgcgccggtgcgcagcagtttgctgccaacatcgcgcagctgcaggcacttctgggctgaaaaagatccgccggatggttccggcggatttttcatgccgttttgcgcgctcagcccttctttttcatgaattgtcctgccgcgcgcatcatgaggcgcttggtgccggcagtctcgaattccacctcgagcagcgcgtcgccgcccatgggctggatcttcgtgacgacaccggagccgaacgcgcggtgcgtgactcggtcaccgacggcgaaggccggtgcagccttgcccgccggctttgccgcaggcggcgcggggcgcatgggcggcttgcgccgcggctccggtgcggagaccgtataggcgcgcggcgcgctctggcgcggcgggtactgctgctggtcgcggctgggctcggaatagccgtagccgcgcggaacgttgagcttctgaatatcgtcctccgggatctcctcgacaaagcgggagacgcggtttgccgtcgtgcggccgaagagcatgcgctggcgggcacacgtgaggatgaggtgctcgcgcgcgcgggtaagcgcgacgtagcagagacggcgctcctcctccatctcgtccggctcgccgatacagcgcaggccggggaaaatgccctcctcgcagccgacgatgaacaccgtcggaaattccaggcccttggccgcgtgcatggtcatgagcgtgacacagtccatggactggtcgtagttatcgaggtcggtatagagcgcgacctcgtcgaggaatcccgcgagcgtaggatcatcggcctccttgacgaaggcgatgatgttcgacttgagctcctgcacgttctcgatgcgtgcagcatcctcggccgtgttcttttcctcgagtgcgcggacgtaaccgctgcgctccacgaccagatcatagagctcgtccggcggcatggttttggcctgttcctgcagctcctcgatcaggatggcaaactggcgcaggcgcatctggctgcgctgcagctcaggataggcatccgcgtggcggataatgtcaaagaggcttgtctgctgcgcgtttgcgagctgtgcggccgtttcgaccgtgcgcgcgccgatgccgcgggcaggtgtgttgatgatgcgcgtcaggcgcaggtcatcacccggcgtctggatgacgcacaggtaggccagcatgtccttgacctccgcgcggtcgaaaaagcgcgtgccgccgatgatgcggtacgggatgccgttgcgcttgaaggcgtattcgagctggttgctctgcgcgttcatgcggtagagcacggcgtggtcgcggaagttcatgccgtggccgaaatcgtccatgatcttcgtggccacatagcgcgcctcgtcgttctcgttcgtggcgcagtagagcgtgagcgggtcaccggcttcggcctttgtccagagcgttttgccctttcggccggtgttgttggcgatgacgtggttggccgcgtccagaatgcggccggtgctgcggtagttctgctcgaggcggatggtgcgggcatttttatactgcttttcaaagctgagaatgttctcgatcgtcgcaccgcggaacttgtagatgctctggtcatcgtccccgacgacgcagatgttgccccagccgtccgccagcagggccgcaagccggtactgcagattgttcgtgtcctgatactcgtcgatgagcacgtagcggaaacgccgctgccagtgctcacgcacgtccgcatgctcgtcgagcaggcggacggtgttgtagatgaggtcgtcaaaatccatcgccccggcggaaaacaggcgctgccagtaggtctggtacacctcgccgatgcggatgctgcgcggattgtgcgtggcctgtgcacgcgccagatactgctccggcgtgatgccggcatccttggcacggctgatctccgtgagcacggcgcgatatgggaacgccttctcgtcgagattcatctctttgagaatgcgcttgacgaccgcctgactgtccgatgtgtcgtagatcgtgaagctgtttgggtagccgagcttgtccgcgtccttccgcaggatgcgcacgcacgcggagtggaacgtcgaggcccagatatccgccgcagcctcgggcccgagcatgcgctcgatgcggtccttgagctcgtctgccgctttgttcgtgaacgtgatggcgatgatgcgccacggctcgaccggctcgaccgccgctgcccgctgcgcgcgccggcgctcgtccggcgtcaggtccgtgcgctcgagcagcgcaaggtccgcctccgtcgccgcgtccggcacctcgtcggtgtcggacccgcggccgtactggatgagattcgcgatccggtggatgagcaccgtagttttaccgctgccggcaccagccagcagcagcagtgggccttccgtggtcaggaccgcttgcctctgcatatcgttcaggttcgcgaagtccgccgcaatgaagcgtctgcgcgcctgcacatagcgttgttcaaaagtcatcgttgtattcatagcgtctgattttaacacattttcccccgggaaacaaggcccgcattatccggcgcggagattgacaatcgcaggatgcggaagtaaaataaagaaaatttgatgattgaggtgcatcttatggacatcatctggcatggccattcttgctttgagctggtctccggcggctacagcgccgtcatcgacccgtttcaggacaccagcgtcggcacggcctatccccacgtgcggctgacggcggacgccgtctatatcagccacgaggaccgcgaccacaacttccgggaaggcgtcacgctgcgcagcaacagcaagacaaacccgtttgccgtcacggagctcgagacgtaccacgacatcatgcgcggccgtctgcgcggcatgaacacggtgcgcatcttcgccgccgagggcatgcgcgtggcgcacttgggcgatctgggcgcgaagcccacgccagagcagatgcagcagctgcaggggctcgacgcgatgatgatccccgtcggcggcatctacacaatcgagccggacaccgcctactatctctgcgagcaactgcagccgcgcgtcatcatcccgatgcactttcaggcgcccggccacagcaaccaccgtctgcgcgcaccggaggacttcaccggcatttttgagggcaacggcgcaaatgtccagcgctatgacaccaaccgcatgacgctcacaccggacatgccggcgcaggtcgtcatcttccgccgcccggaataaaaaacacgatacagcaaagccgccgctccccgatggggagcggcggccgttttctctgcaattatttcagaatgtccttcagctcgtgcataccatggttggtggtgacgacaaccacgcgatcaccgagctcgatggcatcgttgccggacgggacgcggcacttgccgcggcggatgattgaggcaacgagcacggagtccttgagcttgagcgccttgagcggcacatcgagaaactggctctcggcacgcacgataaattccagcgcctcggcctgcccgtcggccaccatgcgcagcgtctccacgccgctgctgtgcgcagagttctgcatccagcggacatactccacaatgcggccggccgtcacgtccgccggctggataatcgtcgtcagaccatacgattccgcgagctggatgaaattgtcctcatccaccttggtgacgatcttcggtactttctcatgatacgcgaacgaggagatgatgaggttcgtctcgtccgactccgtgagcgtgacgagcgcgtccgcctccggcaggccctcctcgcgcagaacgtccggcttcgtaccgtcggcgcagatgatggttgcctccggcaggagcgttttcatgacgcggcagcgggccgggtcgcgctcgatgatcgtcgagtggatgtgcatgcgcgtcagctccagcgccagccgctcggcaatacggccgccaccgacgatgatgacgctctcggcctcgtggcgaaactcaccgatcttgcgaaacaattcgtgcagctcgtgcggtgcaccgaccacggtgacatagtctccggcggcgagcacaaagtcgccgttcgggatcgtgacgctgccctcacgctccacggcacagatgaggatgccgtcgctgtagcggccgcggaaatcgttcagacgcaggccgtcgagcttgctgccctcgcgcagcttgaactccacgagctccacgaggccattggcaaacggctcgaccttcgtagcggccgggaagcgcagcgtacgcgagatttctttggcggaggtacgctctggattgatggacagactcagccccagctcatcctgcagcagcaccacgtcctgataatactcctcgtcgcgcacgcgcgcgatcgtatgcgtggcaccgagcttgcgcccgaccatgcagctgatgaggttcgtctcgtccgaagtcgtcgcggcgataagcaggtcggcatccgcaacgttggcgatgcgcagctggtccacattcgcgcggccctcgaccacgatcacatccagcgtggaggaaatataggcagcgcgctcaggatcactctcgacgacggtaatgtcatgcccttctgtcagaagctgttccgcaatggcataacccacgcggccagcgcccacgatcacaattttcatattctaagctctccagttatcatgttcaggcccctagtccgggtgactaaatattatagcagacattctcccatgtttcaacagcgacgcaggaaaattatatcgtgtttgtttgtgaataaacagttaaaattctgcaaaaccggcgtcctgccgcttgacggatgctggcgccgcgcttatcattatgttctaatactttttttagtatctaaggctgcgccgccgtgcagcgtccatataaaggagcatcccatccatgctggaactgaaaaacatcaccaaggtctatgaggccggcacgacgcaggttgaggcgctcaagggcatcgacatcgcctttcgtgagagcgagttcgtcgcaattctgggccagtccggctgcggcaagaccacgctgctgaacatcatcggcggtctggaccgctatacttccggcgacctcatcatcaacggccgctctacgaaggagtacgacgaccgcgactgggacacgtaccgcaaccactccatcggcttcgtctttcagagctacaacctcatcccgcaccagagtgtgctggctaacgtcgagctcgcgctgacgctctcgggcgtctcgggcgaggagcgacgtgcgcgcgccgtcgaggcgctggaaaaggtcggtctgggcgaccagctcgacaaggcgccgaaccagatgtccggcggccagatgcagcgcgtggccatcgcgcgcgccatcgtcaacaaccctgacatcctgctcgccgacgagccgaccggcgcgctcgacagcgaaacgagcgtacagatcatgaatctgctgcaggagattgcaaaagataagctcatcatcatggtcacgcacaacccggagctggcgtcgaaatacgccacgcgcaccgtgcgcctgctcgacggcaggatcgtcggcgacgacaacccgtgcacggagtccgaaacgtctgcacccgtgacggtcaaggtcaaggagcatacatccatgagctttgcgacggccatgagcctgtcgctgcacaacctcatgacgaaaaaggcccgcacgctgctcaccgcgttcgcagggtctatcggcatcatcggcatcgcgctcattttgtcgctttcgcacggcttccagtcgtacattgacaccgtacaggagcagacgctctcatcctacccgctgacgattgaggcaaaccccgtggacatgtccggaatgctctcggccatgtcaggcgcaaaagatgacagcaaagacgcgcatgatctcgacaaggtctatgccaacacggtcatgtacagtatgctcaactccatggtcagcagcgcgaccggccagtcgaacaacctgccggaattcaagaaatacctcgaaaaccccgacaacaagatccacgactacatcagcggcatccagtacacgtatgacatgggcttcgccgtctacaccgaagatcccaacggcaccgtcatcaaggccgatacgaccgagctgctgcaaaacgttatgaagtccatgtacggcggcgactacacggcctactttgactccatgggcggcttttactccgggttcaacgtctggcaggagctgctctccggcgaggacggcgagctcgtgagcgcctcgacgcagaatcagtacgacgtgatctacggctcctggccgcaggattacaacgaggtcgtgctcgttgtggataagaacaacgagatctccgacctgacgctctatgccctcgggcttgagagcatggacgacatcagcaacgccatgatgcagtccatgagcaaaaagcagatcgacacgacgcaaaacagctggagctatgaggatctgtgcggccgcagcttcaagctcatcctcccgtcggagggctatgtggccagcggctccggctacacggacatcagtcagacgaccgacggtctgcgccggctttacaacaacgattccgtcggcgtacagctcaaaattgtcggcatcgtgcgtccggccaagggcagcgtgaccagcaatacctacggctccatcggctacacctccgccctgacggactacgccatcgatcaggccgacggcaccgagatcatccagaagcagctcgcgaacccggacgtggacgtgttcaccggctccgcgttcccgaacgccgcgaccgccacgaccgagcagaaggtcgccgccgcacaggcctatctcaaccagctgagcgtggacgaccgtgcgaccgtctaccgcaagtgcatgaccacgccggatgacgccacgctcgacgccgcgctcacgcagaccatggcaaccttcacccgtgacgaggccaaagagatggccgacaacggcatcttcgaggccagcggcaagaccgcgcagcagatgaaagaaatgatcgacgccatggacgacgagacgttcacgcgctttttccgcccgtacctgcgcgcgatgctgtccatgcagatgcagcaggagactgtcaagtcctacagcggcatgacctcgcaggagatcatctcggccatcaacgccaagggcatcagccgcagccagtacgtggacgtgtacgacaactacgtcgcctcctccgccagcggctcgacctatcagagcaacctcaaaaagctcggctacgtcgacaaggattccccgagtgccatcaacatctacgcttccagctttgaaaataaggaccgcatctccgactgtatcgacgactacaacgccgacaatccggacaatcaaatcagcttcaccgattacatcggcctgctcatgagcagcatcacgacgatcatcaacgccatcagctatgtgctcatcggctttgtggccatctccctcgtcgtgtcgtcgatcatgatcggcatcatcacctacatctccgtgctcgagcgcacgaaggagatcggcatcctgcgctcgatcggtgcaagcaagcaggatatctcgcgcgtcttcaacgctgagacgctcatcgagggcttcacagccggcgtaatgggcatcctatgtacgctgatcttgctgatcccgattaatctcatcgtgcaccatctgaccggtctgccgactctgagcgccattttgccggtgctcggcgccattttgctgattctcatcagcatggcgctgacgttcatcgcgggcctcatcccgtccggcatggccgccaaaaaagacccggtcgtcgcgctgcgcaccgaataaacccaaaacgcatatttccaccacctccgtgcaaactaggagcagcctacatttgcacggaggttttgcaatatgaagcagaaaattcttgcggtccttggcgcgctggcgctgtgtacggcgctcgtcccggcgagctttgccgaacaggacacagccggtaccgcacccgtggccgaaaatctggagctgaccacattccgcaacacgtccatcggcggcacgctgagcgccaacgcgcccgacggcagcccgctcacctttcgcatcacgaccgagcccattaagggcacggtaacgctcaccgacagcggcacgttcgtctacacgcccgctgacggcaagcgcgggcgcgactacttcggcttccgcgccgccgacagcagcggcaacgaatcgcaggaggcgaccgtcctcatctccatcaagaagcagaagccggacgtcacctacagcgacatggccggccgcccggaggaatacgccgccgtcatgctcgccgagcaggggctgtgcgtcggccggcaggttggcgagcagtatctcttcgaccccgacagcacaatgccgcgtgatgagtttctcgccatgtgcacgcatctgaccggcacggagacactgcagggcgtgctctcgaccggcttcggagacgacgagcagatcccggcgtgggccaagacctacgtcgcgaccgcggtcatgaacggagacatcgacggctgctctgacggcacggcaatcgtgttcgacgcgcagcgcggcatcactgcggccgaggccgccgtcatgctcagcaactttctcgacccctcccccgccgccgcgctcgagagcgcctatattcccgattgggcgtgcactgccgtgtcgagcctgacgtcctgcggcgtgtatccggacggcagcgactgcgcggcccccattacgcgcgccgaggcggcacagatgctgctgggcgcatatgagctgctgcaaaagcgataaaaaagcacggaccgtttccgactcggaaacggtccgtttctttatgcatctttcaaaatcgcgtccagctccgccgggctgagctccgggaacggacgcacaggcgcgggatttgcttcgtgcgcaccgatgcacttttccatccagaccatggaataccacgtgccgaacttatagccgcagcgcggaaactccccgacaagccggtagccgaggtgcgcatgaaactgtgcgctgtttttcgtcaggtgcgcatcgtccgccccgtccggataaccgatgcaggcatagagattttgaatgtgctgtgcgcgcagcaccgcctcaagcgcggcatacagccgcctgccggttccccgatgccgctgatcctcgcgcaggtaaatgctcatctccgccgcccagtcataggcggcgcggctgccgaacggcccggcataggcatagccaacgagctcaccgccgcgctctgcgaccagatacggataccgccggagcgtggcgcgcatacgcgcggcaaattcctcaacatcgggcacagtatactcgaacgtgatggccgttttttccacatacggcgcatagattgtgcgcagtgcgggcgcgtcgctcaggcgcacggtgcggatacacagtgctgtgtcgtccatgttcttctcactttccgctgtcgccgtagtttgcgagcacgcgcgcggacggatcgtccacgtcgcagccggcccatgacttgttcggcatccagaaatcgacgatcatgtgtgcctgaccggggtaatactgctcaaacagctcacggtagagcagggattccttggtgaacggctgcgcaaagtcgtacttccggcgcagggtctcgaattcctcgtccgtgtacttgtcctctgcgtaggccttgagatcgtcgaccatggagtggcccactgcgtcgctgaaggccgccttctcacgcatgagaatgtcgtgcggcagccagtcgccctcaaaggcgtggcgcagcaggtacttgcccttgccgtagacgttgcacttcttggccgggtcgatggacatgacatactgcacgaagtccagatcgccgaacggcacgcgggcctcgagactgttgacggaaatgcagcggtcagcgcgcaggacatcgtacatatgcagctcgcggatgcgcttggcggactcctcctggaacgccgccgggctgggcgcgaagtctgtgtacttgtagccgaagagctcatcggaaatttcgcccgtgagtagcacgcgcaggtcggtctgctcgtggatagccttgcagacaaggtacatgccgatgctcgcgcggatggtcgtgatgtcataggtaccgagcagcgccacgacctccgggagcgcctgaatcacatcttcgggcgtgatgatgacctcggtatggtcggcgtgcagatactccgccacctcgcgggcgtacttgaggtcgatggcatcggcacgcatgccgatggcgaacgtgcggatgggctttttgagcagctttgccgagatggcgcacacaaggctgctgtccagcccaccggagagcaggaagccgagcggcgcgtcggcatcgaggcgcttttccacgcctgcgatgagcttctcgcggatgtgggtgcagacggtctccagatcgtcctcacagacggcgtcgacctgcgtcatgtcgcggtagcaggtgaacttgccgtcggcataatagtgtccgggaggaaacggcatgacatcgtgcacaaggccgacgaggtttttcgcctcgctggcaaagacgatcgcgccctcggcgtcatagccgtagtacagcgggcggataccgatggggtcgcgcgccgcgacgagaccgccgcgcttggcgtcgtagatgaccatggcaaactccgcatcgagcccgcggaacatatccagcccctcgcgctcgtagagcggaagcaggatctcgcaatcggattcactctcgaacgtctcgccctcggcaatgagccgctcacgaatgggacggaagccgtagatctcgccgttgcacacgagcgcactgccgtcgcgcgtgaacggctgcatcccctccggatgcaggcccatgatggccaggcggtggaaaccgagcgtcgccgcgccgatgtgcagcatacgcgtatcgtccgggccgcgagaaatggtcttgtcaaagccggcgcgcagatcctgcgcgctgatggacgagccgagataaccgatgatggaacacatgattttttcctcctgaatgaatcaaaaatacgcagctactgtccggcaataggacgagtagctgcgtatcgtggtgccacctattttacttctcacgggttctaacaaaccgcaccgggataacgtccggctttgacggcgcacctactgaggctctcgcccgttcagattgcagctcgggagtgttcttcacacaggctctgttatgcggctcgcaccgtcccgcactcgctgggaatgatcgcccgtgctacttttctccgtcaacgcttttgacagaagtatggaattgaaagaagagaaaaaagaaagagaaaacgatgttaacgcacgctgaacagcagatcaccgtaggacgggaccggccacttgtcggacggcgtcatggtctcgagctggtcgatcgtgatacgcagctccgccatggcggagaaaaccttgtcacggtagtagttcgccagtgcctgactgccctcaaccgtcttggcgcccatgagcgcctcatccaggctgcggaccttgcggtaggcgtcgcccagcagcgcagacatttcggggatgatgctctcttcatacgagcagtccgccgtaacggacacggcgtggatcgccgtggcggtctcggacagctcgcgcagatagctgctgacggcgggcatgatgtcgcgccgcgccatctcgagcatcgtcagcgcctcgatgttgaggatcttgctgtagttttcgaggtggatctcatagcgggcctccatctcggtgcgggtgtagacgcggtgcttggtaaagagcgccacgttcttgtcggcgaggtaatacggcagtgcctccggcgtcgtgcgcaggttcagcaggccacggcgctcagcctccgccagccaggcatcgtcatagccgttgccgttaaagaggatgcgcttgtgcttgatgagcacgctgcggatgagcgcctgcaggtcggcctcgaagtccttgctgccctcgagcgcgtcagcaaactgctcgaggctctcggcgaccgccgtgttgagcacgacgttgatgccggaaatggaagccgaggaaccgggcatgcggaactcgaacttgttgccggtgaacgcaaacggagaggtgcggttgcggtcggtcgtgtccttggggaagcgcggcagcgcatgcacgccgatcttcagcagctccttttcctggccggcgtaggacgtctcgttgacgatggcatcaagaatgttctcgatctcatcgccgacgtacatcgacacgacggctgggggcgcttcattcgcgccgagacggtggtcgttcgcggccgacgccacgctgatgcgcagcatatcctgataatcatccaccgcctggatcaccgcgcacaggaagagcagaaactgtgcgttctcggccggcgtctcgccgggctcgagcaggttcatgccggtgttggtggtcagggaccagttgttgtgcttgccggaaccgttgacaccggcaaacggcttttcatgcagcaggcagaccatgccgtggcgcgcggccaccttctgcatgatctccatcgtcagctggttctggtcggcggcgatgttgccggtcgtgaacaccggcgcgagctcgtgctgcgcgggcgccacttcgttgtgctcggtcttggcgtaaacaccgagcttccagagctcctcgtccagatccttcatgaacgccgcaacgcgcggcttgatgctgccgaaatagtgatcgtccagctcctggcctttcggcggcttggcaccgaagagcgtgcggccggtatagatcaggtccttgcgcttgtcatacacggacttgtcgatcaggaagtactcctgctcggggccgacggtcgtgcgcacggcggtcacgtcctcgttgccgaacagatggatcacacgcagggcctgccggttgagcgcctcggcgctgcgcagcagcggcgtctttttatcgagcgcctcgccgccgtaagagcagaacgccgtcgggatgcacagcacattatctttaatgaatgcataggacgtcgggtcccaggcggtgtagccgcgcgcctcaaacgttgcgcgcaggccgccggacgggaagctggacgcatccggctcgccgcggacgagctccttgccggagaactccatgatcacctgaccgccgccgcagggagagatgaaactgtcgtgcttctcggcggtgatgccggtcatcggctggaaccagtgcgtgaagtgcgtggcgcctttttcgatcgcccagtctttcatggcattggccacgatacgcgcggcatcgtcatcgagacgcttgcccttttccatcgtcgcctgcacctgccggtacgtttccttcggcagacgctcgcgcatgactgcatcgttaaataccatggatccaaaaatgtcagagatcttttccat

SEQ ID NO: 138 - DNA, 17606 bp, unidentified
  source 1..17606: mol_type = unassigned DNA
ttatacaaccgtcacaacacctatttcaacttgattattgattctggggatgaatacggtgttgctcagacctgcgcagacaatcatttttgtgccgtcaaggtcaaattcgcctttgtcatatttcggaaaaagtccctgattcggagcgattactccgccgatgaacggcaattgaatctgtcctccgtgggtgtgaccgcagacgattaagtctatgtcggttttctttgcgtcctcggcaatgtattcgggctggtggtgcagaagaattgtgaaattgttctttgctttttcggcaaattcttcccacagcgttcttgacggaacatcgtcatcgggagtgtagaactcataataagggtagtcgctcattccgcctataagcacactcttgccgtttttggtgaattttatgtattcattatcgagcaatacagcgcctgttgaatctgtttcgcttttaaaatccgttccgaatttggcggcattgtcacgctcatggttgccgagacagcagtatgtgggtgcaatttttgaaagcttttcaagcacatctttcatcttcgttgtgtcgggatcgccacggttgaccatatctccgcaaactgcaataaaatcgggattttgttcctttacaagctctgcaaggtctgcgttcttttctccgtattccttgttgtgcaaatccgtgatgacaacaaatttcagctttgcgtcgttcttagtattgtttacacagtaatttgtgattgcaattgtgttgtcacagtaaacgccccatattacgagagtcacaaacagcgcaagtattattgctccgaggattatcgaaaaatttttcattcaatttaccgcccatattaagtatggtattattttaggctcgttttgtgcggttgtcaacaaatgtgtgtcgaacaagtctgattattactgttccttgtgctttgattgtcggattttgagttgatttaggaattgctttgtttgacattccttttgcactgttgtataataaatcataattgtatttatatgttactcgggaaatttacacaaagttaaacagaagaggtatgggttatgaagaagattaatttgcgtaagatgttgctggctctcgcagatgtgtttattatcgttgtcagcggtattcttgcaaattatattctcttgcttgtcggctacataggtgctgcttcaagcaaaggcttgttgagctatattgttattgatcttgtcatgtgtctgtttacgctttatataagcggaacatattcaaaattgtggcgatactttaacgcaaaggactatatggtgtgcggaattgccgtcttttcggggtttacgctcggctttgtaatctcgttgtttttgcagattccgcagagaaagattttttgtatagtacatttcgcaatagcccttgtcggaattcttgcattccgttttgttttcagaagggcttttcttgaccttaccgaggcaggaagggcagagggcggagagcgcacccttattgtgggcgcaggcaatgccggcagaatgattgttcgtgaaattcacaatgcgaaagagcagggtgatgttaataatccttcaaaaagcatcattccggtatgctttgtcgatgatgatttgaaaaagctgaatcagaagatcgaaggaatccccgttgtcggaacctgtcccgaaattgttaaaatatgtgatgaataccgcatagacaatattattgttgcacttccgtcatgtgaggaagatgagaagaggaagattcttgactactgttccgcaacagagtgcaaaatcaagattatcccttatctcggcgagcttttgtttgatgacgggcatacacagcttatttcacaggcaaaggaaatcaagattgaggatcttctcggcagaaaacccattgagtttgaccgaaaggagattcatgaccttatcaacggaaaggtttgtcttgttacaggcggcggcggttcaatcggcagtgagcttgtaagacagattgcaaagaatgatccgaaacaaatcatcattgttgatatctacgaaaacaacgcatatgacattcagcaggagcttgtgcttgaatacggcacaaagcttaaccttgtaacgcttatttcatcggttcgtgattacgacaaaatggagcttatcttcaagacatatcgccccgaactcgtattccacgctgccgctcacaagcatgttccgcttatggaaaccgttcccgaggaggctgtaaagaacaacatcttcggcacattcaatgttgcaacccttgcagaaaagtacaaggcaaagaagtttgttatgatttcaaccgacaaggctgttaatccgacaaatgttatgggcgcaacaaagcgtgcgtgcgagatgattattcagtacaaggcgcagcacagcaccgataccgaatttgtaacaacaagattcggtaatgttctcggctcaaacggctcggttattccgctgtttcgccgtcagattgaaaacggtgcgcccgttaccgtaacacatcccgatattatcagatattttatgactattcccgaggctgtttcgcttgttcttgaggcaggtgcaatggcaaagggcggtgagatttttgttcttgatatgggtgctcccgtcaagattacaacccttgccgagaaccttatcagaatgtacggtaaggttccgtacaaagatgttccgattatcttcacgggacttcgtccgggtgaaaagctttttgaggagcttcttatggacgaagaaggtcttaagtcaacacagaacaagaaaattttcataggaaatcaaattaaaatagacgaaacagatatgctgtcaaagcttgaggttcttaaaaagaccgcagaaaacaatgacagtgaaaagacagttgaacttttggcagaacttgtacctactttttgccacaaggtcaatgattaacctaaaaggagaaattttatgtgcggtattgtaggttatgtaggacctaaggattgcagtgaggtgcttgttaacgctctcacaaagcttgaatacagaggctatgactcggcaggtattgcggtttttgataacggagaaatcaagaccgtaaagaccaagggtaagcttcaggacttaaaggataagcttgcagaggtcggcactccgaaaggtcatgtcggcataggtcacacccgttgggcaacccacggcgagccttcggatgtaaactcacatccacacagcggtgcaagggttacaatcgttcacaacggtattattgaaaactatatggagcttaaagatttcctcatctcaaagggaagaacttttttaagcgacacagatacagaggttgttgctcagctcctcgactataaatacaacggaaatcctcttgaaacaattgacagtgtaatggctgagcttaagggttcgtttgcactcggaattatgttcaaggatttccccgacagagtttttgcggttcgccgtgaaagtcctcttatcgtaggcgttgcagagggtgagtgctttattgcgtccgatgttcctgcaattcttcagtacacaagggattattatcttcttgaccatgatgaaatcgtaacactttcacctgacggtgtttcattcgttgacgaacaccttgatccgattgaaaaggaacttcagacagccgactgggatatggaggctgccgaaaagggcggttatccgcactttatgattaaggaaatcaacgaacagcccgaggctatcagaacaacgattatgccgagaatcaaagagggacttccgttccttgaggagtgcggcatcacaacggaaacaatcaagaatttcaaaaatatcacaatcgttgcctgcggtactgctatgcacgcaggtatggtcggcaagtatgttattgaggatctcgcaagagttcccgtaaatgttgacattgcgtccgagttccgttacagaaatccgattgtaggcgagggcgaccttgtaatcatcatttcacagtcgggcgaaacagccgacagccttgccgcaatgcgtctcgcaaagcagaagggtgcaaaaactcttgcagtcgtaaacgcaaagggcagttcaattgcccgtgaggcggatatgctcatctacacactcgcaggtcccgaaatttccgttccgtcaacaaaggcatacatcacacagctttccgttatgtatctctttgcctttgagcttgctcttgcaaaggaaacaatcagcacagccgagtgcaagcgacttgtttcggctcttacaaaaatgcctgaggcagttcagtatgtaatcgacaactgcgaggatatctgcaagttcgttgccacaaagcttgttgcaaccgacagcttgctttacataggcagaggtcttgactatgccctttcaatggagggttcactcaagctcaaagaggtttcgtacattcactcagaaagctacgccgcaggcgagttaaagcacggcacaatttcgcttattgacgaggatgttcccgttatagccgttgcaactcagacaggtattatccccaagacaatcagcaatgttgttgaggttaagtcaagaggagcgaaggttattcttgtttgtacagacgcctgtgcaagagaactcaaggacggtgttgcggattatgttatcgaaattccgcatacagacgagcttcttatgccgattacagcggttgttccgctccagattcttgcttattacacatcaatcaacagaggtattgatcccgataagccaaagaaccttgctaagtcggttactgtagaataaacggcggtcttgtattcaattgaaaattgaaaattgaaaatgtaaaattatggtcgggaaggcagtttgcaaaatgcaaatcattgtcgcccgaccattttttatttatatgaaagtatatgcttaattgtatgagcgtccaatgaacgcttctacataacttactcttgttttcaaatttcaacggtaaaaaccttgtatttttttgacagattatgtataattaattagatatacattctaaaaagcagtattgatgaatctaatttagtttcgggggaatatacggacatgatgaaaactgtttttaaaagagctgtaacgcttgcaatttgtgccgtaacggtattttgcggtatttttgcctgttcaggcgcaacaaaagattacgagattccgcagattgacgatatgacgctttcaatgcctgacggtatgagcgctgttacaagggacagtaaaagcacagataaatatttttccgttttcggtcttgattatgacacaacaatgaaaacctttcagaacggaaatatctatcttcagggtatggataatatgtcatcggttattctgaccgtgacaatgacaaaaaatgagagcagcgagaatgtcggcaactatgctcagctttcttcaagcgagctttcaaatatacgcaacaattttcttaattccgacgagtatctgagctgtactcccgaccaaaaagaaaaagctgtgtggcttgtgtttgacgcaactgctcagagcagtaagggcgatgtgaaaacctttattgccaacacggtttatgacggtatgaacattaatatcacaatgcagagaacagagggtgatgttacaaccgttgactacgatactttttccaaaattgtatcttcggtaaaattcagcgacctgccgttttcaaagggatttattccgtacataatcatcggcggcggtgttgttatccttattttgattgtactcatcataatttttgccgtgagaatcagaaagcataaaaaggctaagaagaataacgctattcttgaggagcttgcagtcaagtataaactcggtgaaaagggtacggactacgacattgacaattttgacgattctcccgaaaagcccgataaacgctcaaagaaaaagcagaaatatgcggaagaggttgaagaagaaccggctttgccgggcagaagatatgctcccgagccgataatcgaaaatatggaagaaccggaagaaattacaagtgagtattcaaactttggttatgacacggatgatgccaaggaaaaagaaattgacgagataatcaactccgcaaaggcttacaagagtgagcttgagcgtgaggcatataaaaacaactacggttacgaggaaaacagcacggaggacgaaaaaaaaaaggagcctaccgcagcagatacctcagagactgaacccgaaaaaattgacgaaaacgaaaaagataacgcagaaacacctgaaaaacacgaggacataagctcttcgtcgggtcctacactcgttatccccgagcccgaacacgatctttttgaaacaagcgagcctgacgatatcgaccgtgaggacgatgccgatgttgaagaaaccgaggaggtttccgaacaaaagcatccgcttgaaaaaaaggttgacaagtacgcaaacatcattttcggcagtgacgatcccgaggagaaaaccggggaagaggttgatgacgaggagcttgtaagggcaaaggctaagaaaaacaagtttgacagcggttatgacttttttgacgaagctcccaaaaagtcaatgggggttatcaaaagctcagacctcagagatgccgaggacgttgatgttatcggcgaggttgaaagaaaagcagaaaccgtaaagcagaacgctcttgaaaaagagaataataaagaaaccgagggtgaaccgaatgataaacggtcaacggaagaggttcttgccaatgtaggcaaaaacatcggtaacgctctcaggggctttgcaggcggagttaagaattttggcattcactgcggatatttctgcaagaatgtttcaataatgatcaagcgtaagcgtgcgattgccaaacgcaaaaaggcagaggaagagagaagagagagagaaagacaaaaggcagagcgtgcaagaaagcgtgccgaaagaggcgaaagtgacggacttgttcaggttcacagcagaaccgaccgccgcccccagcagaatcgccaccctgcaaacagaaacaagagaagataatttcttttcttaacggaggaaaaacatggaaatgctaattaaaaacgcagtggttgtttcccctgccgacaagcttaacgaaaaaacagatattctcataaaggacggtgtgattgccgaaatcggcagcggcattacatcagacggagagattattgacgcagacggtctttgtgccgttccgggatttgttgatatgcatgtgcatcttcgtgatcccggtcagactcacaaagaggatattatcacgggatgcaaggcggctgccgcaggcggtgttacaagcctgcttgcaatgccgaacaccaacccgacaaccgacagccccgaaattgtaaagtatattcttgacaaagctaaagacgccgacagccgtgtttatgttgcggcaagcgttaccaagggacttaaaagcgaagaacccacagacattgacgctgtgaaaagtgcaggtgcaattgcactcaccgatgacggcagacctgttgaaaacacaaagtatttgagtgacgcaatgaaaaaagctccaaagctcggcatgacaattgtcgcacattgcgaggacttgtttcttgccaacggcggtaaaattaacgagggcgaggtttcggaaaagctcggtgtcaagggaatccctgccggtgccgaggactgcggaactgcaagagaaattgcacttgccgccgctcttaacgagcctattcatatctgccatgtcagcaccaaaacaagcgttgcacttatccgtgatgccaaaaggagaggtgttaaggtgaccgccgaaaccgctccgcattatgtttcgctcacggacagggagcttttaagaggtgacgctgattacagaatgaatccgcctctcagaactcaggctgatgttgacgagattatcaacgggctttgtgacggcacacttgatgccatagcaaccgaccacgcaccgcacacacccgaggaaaaggctgattttgtaaaagcccccaacggttcaatcggcatggaaacctcgtttgcggtctgcaacacatacctggttaagacaggcaaaatgacgctttcacagcttgttgagaagatgagtgttaatcctgcaaggattttgaaaatcaacgcaggcactctttcagtcggtgcaaatgccgatgttgttcttataaatcccgatgaagaatggacagttgatgttgataaacttcacggcaaaagcaaaaacaccccgtttaaaggcagaactctcacaggtaaagtcaaaaagacaatcctcggcggtaaggtagtttttgaagattgagtttgttttaattgtagatgttgatactattaaaattgtgcaaacggtagctgtactacgctcgggcataaatgttttttatttgtcaaactgtctgcacgaattggggacggcggctcgccgtgttcgctcaccaaataaatttaatttaatataaactttaacataaaggagtaaaattatggcacagaagggtgacctcctgtcggtaagacaggatatcagagtagtagacgcaacaatccgtgacggcggtctttgtaacgatttcagatttgacgacaaattcatcaaggatctttacaatgcaaatgttaaagccggtgttgattatatggaattcggctacaaggcatcaaaggaaatctttaacgaagaagatttcggtaagtggaaattctgtaacgatgcagatatcagaaaaattgtaggcgacaacaagacttctcttaaaatcgctgttatggctgatgtcggcagaacagattttaagaaggatattatcgcaaagaaggacagcccgattgacctcatcagagttgcaacatacatcaacgcaattcctgcggctgttgaaatgattgaggacgctgcaaagaagggctacgaaacaacaatcaatattatggctgtttcaaaggcaagaaccgaggatattacagcggctcttgaaactctcggcaaaactcccgtaaacgctttctacattgttgacagctacggcgcactctatcccgaggagtcaagacgacttgcagacctttactgctcaattgccgacaagtacggcaagtcggttggtattcacgctcacaacaaccagcagcttgcttttgccaacacaattgaggctatgactcagggcgtcagctaccttgacgcaaccgttgacggcatgggcagaggcgcaggcaactgtgcgcttgaacttctcctcggttttctcaagaacccgaagtatcaggttgctcctattctcaaaatcattgaggagtacacccacaagtttaaggctgagggcgttaagtggggttacgatattccgtaccttctcacaggtcagtacaacacacatccccgtcctgcaattcagttcgtaaaagaggacagacaggattattacaagttttcaaatgaactttatgatattatcaacagctaattaaatttgtagcggcgttcattgaacgccaatcgaaccgattgcaaaatcggttcgaccatacaaacgatttgaattaaagtaattaaccacgatataacaatacatttgttgtttattcgttttggtttcacaaccaaaacgattggcggtcattgaccgccgctacggttaagcaatgacattgtttaaatcaaaatatgaacgaacaaattgtttttacattacaaaaaatgaggagaatcactatggcatttgacagacttatcgaaaatattgtaaaaatgcagaatcctacggttgcaggtcttgacccaaagcttgactatgttcccgaatcaatcaaaacaaaatgctttgaaaagtatggcaagacgcttgagggtgcggctgctgcactttttgaattcaacaaggcgcttattgacgcactttatgatattgttcctgccgtaaagccacaggctgcatattatgaaatgtacggctggcagggtgttaaggctctttgtgacacaatcgcttatgcaaagtcaaagggtatgttcgttatcacagacggcaagcgtaacgatatcggcacaactatggaggcatatgctacggcacacctcggtcatacagatgttgcaggcgaaagtattgacgcattcggtgcagacgcactcacggtaaacggctacctcggaacagacggtatcaagccgcttgcaaaaatttgcgattcggacgacaagggcatttttgttcttgtaaaaacttcaaacccaagctcgggcgaacttcaggatatgaagcttgaaacaaatgagagcgtttatgagcatatgggcaagatgtgcgaaggctggggcgaagaccttatgggtaagcacggctattcggcagtaggtgcagttgtgggtgcaacatatcccgaacagctcggtgaaatgagagcaaaacttccgcacacattcttccttgttcccggttacggtgctcagggcggcggtgccgatgatgttaaaaacgcatttgacgaaaacggtcttggtgcaatcatcaactcaagccgcggcattatgtgcgcatggaaaaagcaggggcttacagaagatgattttgccgttgccgctcgtaaagaggctgagcgtatgagagatgaaatcgttggttgcatcggcaaaattaagcttggctgattaatttgcacaacagaatcacgaaatttttcgttttttatgctttagtgctatgaatttattgactttagcgtgctaaaagcgtataattaaaacgtatttatttttacaactatatttttaaattttttttaaaaagggagatatcagaaatggcaagagtatataatttttcggcaggtccttcaatgctgcctgagtctgtgcttaaaaaagcagcggcagaaatgctcgattatgagggcagcggtcagagcgttatggaaatgtcacaccgctcaaaaatttacggtacaatcattgagggtgccgaggctcttttgagagaggttatgaacattcctgacaactacaaggttcttttccttcagggcggtgcgtcaacacagtttgcggctatccctatgaaccttatgacaaagagcggtaaggctgattatgttatcacaggtcagtgggctaaaaaggctcatgcagaggctgcccgttacggtcaggctaatgttgttgcttcatcggctgacaagaccttcacatacattccaaagcttgatccttcaacattcacaaaggacgccgactatttctacatctgcatgaacaacacaatttacggtactgtttatcacgagcttcccgacacaggcgatgttccgctcgttgcagatatttcttcctgtattctttcaagaccgattgatgtttcaaaattcggcgttctctatgcaggcgcacagaagaacatggctccggcaggtcttacggttgttatcgttcgtgaggatcttatcggcaacgctatggatatcactcctacaatgcttaactggaaaactcacgctgacaacggttcaatgttcaacacaccgccttgctacacaatctacattgcaaagcttgttcttgagtggattaagaacgaggttggcggtcttgataagatgtatgaaatcaacaagaagaaggctgaccttctctacggtttcctcgattcttcagagcttttcaagggtactgttgttcccgaggatcgttcgcttatgaatgttccgttcgttacaggtgacgctgaccttgacgctaaattcgttaaagaggctactgaaaacggtcttgttaatatcaagggtcatcgcacagtcggcggtatgagagcttcaatttacaacgctatgccttatgagggcgttgaaaaactcgttgagtttatgaagaagttcgaggctgaaaacaagtaattattgaatattataattattgaatattatgatataacgggcgaacgctgttcgcctgttattgtaaattcttaaaataaaaaattaaaaaggattgattttgatgtataacattcttacattaaacaaaatcgccgctatcggcacaagccgtctcggtgataactataaatacggtgacgatgttcagaaccctgacgcagttcttgtaagaagtgccgcaatgcacgatatggaatttgccgataaccttcttgcaattgcaagagcaggcgcaggcacaaacaatattccgaaggataagtgcagcgagcagggcattgttgttttcaatactccgggtgctaacgcaaacgctgttaaggagcttgttatcgcaggacttcttctttcaaatcgtaaggttattgagggttatgaatgggcaaagactctcaagggcaacggtgcagctgtcggtaagatggttgaaaagggcaagagtcagttcgtcggtcccgaaatcaagggcaagaccctcggtgttatcggtcttggagcaatcggtattcttgttgcaaatgccgctgttgctctcggtatgaatgtaatcggctttgacccgtttatgtctgtgggcaacgctctcaagcttgctcctactgttaagctcatgaagagcgcagaagatgttatggtaaattgtgactacctcacaatccatgttccgcttactgacgacacaagagatatggttgatgccgatatgattgccaagatgaaagacggtgttcgtattctcaatttcagccgtgacggtcttgttaattcaacagcagttcttgaggctgttaagagcggcaaggttgccaaatatgttacagacttcggaacagacgatatcctcggtgaagagaatattatctgcctcccacacctcggtgcatcaactcccgaaagtgaagaaaattgtgctgttatggcttgtgatcaggttaaggagtatctcgagaacggtaacatcatcaactccgtaaactatcctgcaatttcacttgcaagaacaaatgctgacgatacccgtttctgcgttgctcacaagaatgttcccgagcttctcaagaaggttctttctcagataagcggaaatgttgaaaatatgctttcaaagagccgtggcgactatgcttacacaattattgatgttgcaggcgccggtgcagatgaccttgcaaaaatcgcagcagttgacggcgtaatcagagttcgtgcaatctgatttcgattttaattgaactttaattgttggttgtaaaaaattatccgagcattgttttgatgctcggattttttgcgtttatttgtacaaatggttacaatgctacactctggcatgatatgctttaatatcacaaactgtctgcacgaacggggtgcggtggtacaccgaccagatggtatttttttgcattggcaattataaatgttacggaaattgcaacggcacacaattctgcaacgggcaatgccgaccatacaccgtttatgcctataaacatcggcaaaatcagcattgcggcacactcgaaaacaagcgttcttgcaactgaaattacggctgaaatcttgccgttgttgagtgcggtgaaaagtcccgatgcgaaaatattcattccgcacaacagataatttattgcaaaaattctgaatccgctgagtgcaatctgctgaattttttcgttgcctgccgagaaaattccgacaagcggttctgcaaaaaattcagatgccgtaatcattgcaaccgaaattatcagcgtgatttttatgcataatttgaacagcttttgcagtttttcgtgattttgtgcgccgtagttaaagctgatgacgggtgaaactcccgaagtgaatccaaacgaaaccgcagtgaaaataaagtgaatgtacaaaatagcacttatagccgcaacgccttttgcgcctgcaaagtgcatcatctgaatgttgaacagcgctgttgtcacggctgttgaaagatttgtcacagcctctgacgagccgtttgccatagcaaagaggatttcacttaccttgaattcaggcttgccaaagtgcagagtctgctttttgttgaaaaagagcaaaagcggaattgcacccacagccattccgatgattgtgccgagtcctgcaccgattattccaaaatcccacacagccataaaaagaatgtcaagcacaatgtttgtgcaacccgacagtatcgagaaaacaagcatgatatgtggcttgtctgctgttacaaggtacgattggttgagcatctgccagcacattacaaagccatacggaatcataacgctgccgtagtcaatgcagtaggggagaattttttcgtttgagccgaacatcatgtacataggttcggcaaaaattgtgaacagcacagcaatgataacagaaatgaccgttgccgtgattgcaacaccggacataagtcggtttgcttcctcctgtttgccttctcccattttctttgcgattatagcatttgagcctgttgaaaacattaagcccacagccataaatacgagcgtgaacggatatacaatattgattgcggacaatgcgtcacttccgacacagttcgcaacaacgattccgtcaacaaccgtgtaaagtgacataaaaaccatcataagaacggttggcaaagtgaacttcagaatcgtttttgctttgataggttttgcataaattgatgttgccataaaatttccttaccctcaaatttatatttttcacagaccatttaaacgattgtatcataactttgtcgcaattacaaccgatttgtctttttttgtaaaatatgctattatatacagacttaaaagcgaaaaaaggggcggttttatgtttaagggcgcagtttttgatatggacgggcttatgattgacagcgaaaggcttgtttattcaatctggcaggaaatgcttgatgaggacggcaaagagtttaatcttgacattttcaaaaagacaatcggacttcgcagtgaggattcctacgaatattacaagtcggtttacggcgatgattttgactatcctgcttacaaggcggagtcgagaatccgctattttaagcgtatcgaaaagaacggtgtgcctgtaaaaaaaggcttgtacgaaatttttgattatttaaaatcagtcggttgtaaaatttcgcttgcaacttcaacctcgtcacaaacggctttgaagattatgaagaaaatcaatctctatgataaatttgacgcattcgtgtgcggtgatgatgttaaaaacggcaaacccgatcccgaggtttttttgatagccgcaaagaagctcgggcttgagccggtggactgcgttgcgtttgaggacagcattaacggcataaaatctgcacatgccgcaggtatgaccacggttatggtacccgatttgtcagagccgacagacgaaattaaaccgatgattgattttttgtgtacggatttaagcgaagcgataaagcatttataaattgaaaattacggcgagccgccgttcccaaggctccccctgcgagtttatggttcttgcatattgttggctcaattatccgagaaaattacaaataattacaaatggttacaatttacaaaaatacaatttagcagggctgattattatacacattttccacatagttttcaacaattgttaaaaaagaacggcaatacctgttgagcgttgctacggttactgcggaaaagggaaaaatgaaaaataatcattgaataacagcacgataatatgttatactttggtaaacaacaattttaacggaggacaaaatgaagaaaattataaataaaaagtcactcaagggtacgcttgctgttatgttgtgtgccgttatggcattttctgtctgtgcctgtgactttgactctgacacagaaccaaccaaaacggatgcacaaattcagtttgataaatattgtgacgatttgttttcggaagaacttgaggatgacgctcttaccgcacattttgacatttcaaatccgtcggactacggtttgaaatatgacgaggaggactataccctcggtcatgtgtccgatgaagatacaaaagaatcctttgatgaactgaaagaggcaaaaacggatttggaggagtttgaccgttcgggacttacttcttctcaaaagcagacatatgacacccttgaaagctactttgaaattcagctttcatatgagggtacaacagaattgcagagtatatttgcaccgcagtcgggaattgttgcaaacctctttaccaccctgtcagaattcactttctatgaaaaggatgataccgacctttaccttgctgttttgaaggacacaaaacgctatatggacgagtgcattgagttcacaaagaaacaggctgaggacggttactttatggctgaagatattgcacagcagtcaattgacgagtgtgaaaagcatattaagaatgacaagtccgtgcttgttgacgagtttgagtcgagaataaagtcactcggtcttagcgattccgagaaaaagactgttgtcgaaaccaataaaaagtattttgaagaatactacattcctgctttgaaatcagcaaattcagcacttgaaagtctcaaaaaatcaggcaaaaacgaagaaggtctttgcggttacggcaaaatcggcaaaaagtattattcggcaattgtcaaagacaaaacaagcagcagtatgactcccgaggagcttaagtcataccttacaaacagctttacaaaggttggaatgagcatgagcaatgtttcgcaggatgacttgagcaaatttcaggactataatcccgactttaaggacgccgatgaggtgcttgaatttttgattgagaatatcgaggaggactttccgactcccgttacaacctcttacacggcagattatatgagcgattccgcaaagagcgacaatgtgggagcgtactatgttcagggacgaattgacgatacaagcgttaatatcatcaaaatcaaccccgactttgcaaataagggtatgactcagatgtacacaactcttgcccatgaaggctatcccggtcatctttatcagtttaccgcatcaaatgcaaacaaggatatcccgaatgtccgcaagattttaagctttatcggcgctaccgagggctgggcgcagtatgcctcgaaatgtacgcttgattaccttgatacaagcgatggcattaagaaacttatctacgcaaacgatatcctcggctatattctctactcaatggtcgatgtcggtgtgaactacaacggctgggattatgaaaaagtcaaggagtatatgtcaacggcactcggttcagctgacagcgagagcgttacagccgcaacaaaagaggcgtatgaccttgcccgttcaaatccgggttactttctcccctataccgtaggctacctcaagatgattgatatgcgtgaaacagccgaaagcgagcttggctcaagctttgacgcaaaggagtatcacacattcattatgaatctcggaatcacaagcattgatgtctatgaaaaagcccttgatatgtggcttgaaagcaaaaagtaa

SEQ ID NO: 139 - DNA, 14569 bp, unidentified
  source 1..14569: mol_type = unassigned DNA
gtggaatcaaaagcgtcaaaagataaaaaattcgacagtatctatcgggcgtataaagattcaatctttaaagtggctatgcattataccaagtgtgaagatctggcaagtgaaattacacaaaggacattttttcagttatatatctattttgaaaatgtagatttagaaagtgtttatccgtggctgataacaacagctagaaattctgcgtttaactataatcgagatagaaaacgcgagatattagcaggagtatttgatctatttagagggacgaaagacagagtctgttatataaacaatatggaagagtattatctgaggaatgagcagaagagaagggctgagtgcttggagtttagaatctttgaacgtttatataaggaacatagaatatggtatgatgcagttatgcaggtatattgttttggaaaatcacaacaagaggcagcagatcaattaggaattgcagttgaagtattgaatagtagactatatagagccagacaatggatacggaagaattatgagaaggaatatgaagaagttgtcaactggttctgagaaaacagatggtgccgtttcggcaccatctgttgagttatctcgctttgtttcagtgagcagcttcttcgattagtttaataattgtattaatagagtcctgctgtgaagagtgtttcatagcatttatgtaagtgtttttgtgttgatataatttgtagatggaatttaaaagtgtatctttacttaaatcttcttcctctaaaacaacgctgaaaccttgatgttcaaaagaacgagcattcaaaatctgatctccgcggcttgcatttgcagaaagtggaactaaaagattcggtttgcgaagtgcaagaagttcacagattgcatttgcaccggcccgtgaaattacaatatcagtgagtgcaaacaagtcttttaactgattctgaatgtattcaaattgaacataaccttttaaagattttaaggagtcatccatctttccttttccacagaggtggataacatggaagtcttttagtaactcaggaaggatagaacgtatggcattattgacaacaacagagccaagacttccgcctataattaaaataacaggtttgtcatcggttaaatcgcagaattcaagtgcagcagttttgctcccttctaataattcctgacgaatcggagaaccggtaagcactgctttttctttaggaaggtgttccaaagtttctggaaagttacaacacacttttgttgcagatggaatggaaatcttgtttgcaagtccgggggtcatatctgattcatgaataatagttggcacatgacggcgttttccagccatgacaacaggaacggagacaaatccaccctttgaaaagatgatatccggttttaactctttgattaatttattggcttctcggaatcctttcagtacccgaaatgggtcagtgaaattttgcatactgaaatatcgtcgaagcttaccagaggaaattccgtggtaaggaatttcaaattgttcaattaattctttttcaatacccgtataggaaccaatatagtgaatatcatatccgagtttttttagacggggcagtaaagcaatattaggtgtaacatgaccggcggtaccaccaccggtaagaataatacgtttcataacattcctccgaagttttttctataaaataatattaaacagtattttgtcaaaggtcaagaggaatggacaaaagaacgtaagtagtgtaatgtacaggaagagatctgttgatagttgcataaggagacattatgagtgaggaaatgaaacgatttttgcaagaagaactgaaaaaagaagcggatgagattatgcgggaggtggaggcggatcaggatgtagaaagtctgacagcaccttctaagatagatgaaaagctatatgagcagattagacaatataaagaggagcaggaggtattaggagaaaaattgtcgaccgaacagcaggagttaattcgtcttggaaaaatttacaaaagaaaacaaaagagacggaaatatgtggttctggcggcagcagttatggcagcgtttgcggtgggaattacaagtgttggaggaccggagaggatatttcggaagttcagtaatataatggctagtagagatcagatggtgttgaactcagatgatgaaaatgtgacagaggtaaaaggaagcacagaggaagaagcatatcagaggataaaagatgagtttggatttgatccggtgaggatggattatttacctgaaagcatgaagtttcaagaagcaactatcttgggggaaatacaagacagctattttatatatagcaatgaaaagaaagcaagtgttctgtattatataaacgcaaattataatacaagttcatttggagtagatgtggaagatactcttgttaaagaatatgatatagaaattgatggtgtgtgtatacatattaagcagtatcaggtttcagacagcacagagaagagaagcagaggctcttttgaatatgatgggatacagtattttattattggaaatggtctaaaagaggcggaatttgaaaaaattttaaaaaatttacattttttttaaaaaatagcgttagtttttctcgacttatgtgtatatatagtataaggacaaaaaggagagaaaaaaatgaagaaaaaaatattgatgattgcaagtgtatttacgtttggattagctggaacgattacaagtgagacaatctcacatgcgcaggagggcagcaacataactcaagactattcgtatttattgactggagataccatcattggacagatgttgccagaaacaagagggatatatttgtcaacaggcacgtctactatcagcgatgcaggtacggggaaaatagctgcgggaggagttacaatagctgcacaaaagtgtgatgtttctgtaaatgttattgtggaaagattatcaggaggtagttgggaaagggtgacatcgtggacagcgaaattaagcaacacgtggtctgtaggaacagaaaaaattctcagtgttggacgtggatattattatcgtgttagaagtgttcattatgcgcatacagatgtaagcagttcgtggaccggaaatctttggagatagtaaagtatcattaatctgtcatgtctctgggggaactgtcgcagccactgcaagcgtaattatgaggaaactcataaactaacaaaaattagagagagagcttacatcaagaacaaaaccacatagctcatagagctaaaaatctacggatttgcagtggctgcgatagttcccccgggtaaaaaaggaatggaatcatccattccttttctttttgaattataagaaattcctttggaatcctataattcaaaaaatgcacttcgtgcaaagatgcgcaatcttttttacgtgatttataaaaatatataagataattttgaaatttattttccggtagcttgtcttaatgcctgagcaagctggtctgggcaggaagttggacgtggaccgcatttgataccttcaatgcgggcgattgcatcgtctactttcataccttctactaaacgggcaacaccctgtgtgttaccggagcatccgccaacaaattctacggagcggatagtgtctccgtcaagttctaattttatcatacgggaacagactccctttgttctgtattccatgaaattatcctcctctgaatgtgatattagattaatagtgtttcacatattataacaaatgggatatgaaaaaactagaagaaacaaaactttttcttttacgtgcaagtatgacccctcaaaggagtgtttcttctacggactgacaggagcagacagcaaccaatttgtgaatattttcaaaaaaactgtgaaaagtgcttgatgtatgggcaaaaatattataaaatacaaaacgtatggaacgcagaaaagtttagagtttcatgcaaatatttttggcagtgaatgctgccttattgattgagttagaagctcaaattttataagttggttactttataaccggtgttgagaacaacacatcaacttgtgaaacggtcaataagagtattaaaagtaaaatatttgctatatagactctaacataaatatctggaatgtgaagaaggacagtctcggactgtattgttcgcatgaaagtgataaagaagtagacgcaagcaagaatgatgtaaattcctgcctgcgttttttgtatgtaaaattacgcgtggtaaggaattgtagtaacctgatagaaaagaggaacgataagatggaaaaagaattacagcagagagcaccgatatatgaggcattggaacgatttcgaagaatgcgtattgttccgtttgatgttccggggcataagcatggaagaggcaatcctgaactggtggaactgcttggagaaaaatgtgttggaattgacgtgaattctatgaaaccgctcgataatctgtgccatccggtatcggtcatcaaagaggcggaggaactggcagcagatgcatttggagcaaaacacgcatttttaatggttggcggaacaacttcttccgttcaggcaatggtgttgtcttgctgcaaaaaaggcgacaagatcatacttccgcgaaacgtacatcgaagtgttatcaatgctcttgttctttgtggagcgcatccggtatatgtgaatccggatgtagataaagaattgggaatttcgcttggaatgaaagtgtcacaggtagagcaggcgattcgggaaaatcctgatgcagtggcagtatttgtaaataatccgacatattatggaatttgttcggatcttaagacaattgtaaaacttgcgcatgagcaggatatgaaggttcttgtggatgaggcgcatgggacgcatttttactttggagagaatttgccaatctcggcgatggcagccggggcagatatggcatctgtcagtatgcacaaatccggtggcagcctgacacagagttcatttctactcattggcgaaggagtaaaagaagggcatgtaaggcagatcattaacctgacacagacgacgagtggctcatatctgctgctgtccagtctcgatatttccagaagaaatctggcgcttcgcggaaaagaggcttttggaaaggtcgctgcacttgccgactatgcaagagaagagattaataaaattggcggatattatgcgttttccaaagagcttgtgaatgggagcagtatttttgactttgatacgacaaagctctcgattcatacgctggaactgggacttgccggaatcgaagtatatgacattttgagagatgagtatgatatccagattgagttcggagatatcggaaacattctggcatatctgtccatcggcgaccgcaagcaggaagtggagcgtcttgtgagtgccttggcggaagtaaaaagacgctatcaaaaagataaaacgggaatgttgacgcaagagtacatcgacccacgtgttgtcaccacgccgcaggaatcattttatgcggaaaaagagtctcttccgctgagcgatacggtaggaagagtctgcagtgagtttgtaatgtgctacccgccggggattccgattcttgcgccaggggaagagattacaaaagaaattttagattatattatttacgcaaaagaaaaaggatgttctatgaccggaccggaagatgcccagatagagtatctgaacgtgctgaaataacagggaggtgtaagcgatggagatgtggttccatgatgaacatacggacaatgtaaaattggcaatccgagtggattatcaggtgttttcggctcagagtgagatacagagaatcgatgtgcttgagtcgaaagagtttggcaaaattcttgttgtagacggagatttgatgctgaccgaaaaagacgagtttatctatcatgagatgatcagtcatgtgccgatggcagtgcatccgcaagtggaaaagatacttgtaatcggcggaggagacggcggtgttgtaagagaacttgcgaaatatgatacggtggagcagattgatgtggtagaggcagatccacttcttgtggaggtgtgccgaaaatattttccacagatggcatgcagtttgaatgatccgcgtgtgcatatttatcatgaggatggactgcggtttatccgttccaaatccgatgcgtatgatttgattatcattgattcgccgaatccgtttggcgcaggggaagggcttttcacaaaagaattttatggaaattgttttaatgcgcttcatgaagatggtattatgatcaaccagcatgagagcccgttttacaaggaggaggcattccaatgtcagagaatgcacaagagaatcattgaatcctttccgatcagcaggatttatcaggcacatatcccttcctatccgtcaggacactggctgtttgggttcgcttcaaagagatatcatccgattcatgatatggatggaattcagtggaaactgcgtgggattcagacaaaatattatttgccgagactgcatgaaggagtatttgcactcccggcatatgtggaggaattagtacaagatgttgaataaaaatattgtgacgtttataggatgcgagtctgagtatgaagatgcaaagattgtgctttacggagcgccgtttgactcgacaacgtctttccgtccaggcacaagatttggaagtgccgcgatcagaaatgagtcttttggtctggagacatacagcccgtatcaggacaaagaactgacggagtattgtgtgtttgacagcggagatctggaactgccgatgggaagtgcaaagaagtctcttgagatgatagaagaacgatgccgtgtgattttgaaggatggtaaagttccgtttatgatcggcggagagcatttggtgacacttggcagtatgagagcggcggttgagaaatatccccagcttcatatcatacactttgatgcacatgcggatcttagagatgaatatctggatgtgaaagagtcacatgcatgtgtgatgagacggtgctgggaacttgtaggtgacggcaaaatttatcagtttggtattcgctcaggtgacagagaagaatttctctgggcgaaagaaggacatgtgacgatgcatccgtttgacttgaacggtttggaagatgcgatagcagcgcttaaaggaaaaccggtttatttcacggtggatctggatgtgttagacccgtctgtatttccgggaacaggaacgccggaggctggtggagtgagctttaaagagcttttggatgcgattataaaggtgtgcgagggctgcaatgtcatcggatgtgatgtgaacgaacttagtccgcactatgatcaaagcggcgtgtcaactgcagtggcaggaaagattgtgagagaatttttaattgcattggcaaaataaatcaggataaaaacaggaggaagaaaaatgggaaaaatattaattattggctgtggcggtgtagcaagtgtggcaattcaaaaatgctgtcaggtaagtgaagtatttacagagatgtgtattgcaagccgtaccgtttcaaaatgtgaggctttaaaagaaaaactggaaggaaagacaaatacaaagattacaacagcacaggtagatgctgacaatgtagatgagctgattgcattgattgaaaaagaaaaaccggaagtagtactcaatcttgcacttccatatcaggatctgacaatcatggatgcatgtcttgcgacaaaagtacactatattgatacagcgaattatgagccggaagatacagcaaaatttgaatataagtggcagtgggcatatcgtgaaagatttgaggaggctggtatcacagcgcttcttggaagtggatttgacccgggagtgacaagcgtattttctgcatatgcattgaaacactattttgatgagatcaattatattgagattatggattgtaatgcgggagaccacggttatccgtttgcgacaaacttcaacccggagatcaacattcgtgaggtgtctgcaaaaggttcctactgggaagatggtcattgggtagagacagagccgatggaaatcaaacgtgtttataatttcccggaagttggagagaaggatatgtaccttcttcatcatgaagagatcgaatctcttgcattgaatatacctggaattaagagaatccgtttctttatgacatttggacagagctacctgacacatttaaaatgtttagaaaacgtaggaatgacttctattgaaccgatcatgtatgaagggaaagagattattccgcttcagttcttaaaagcagtacttccggatccggcgtcattgggacctcgtacagttggtaagacaaatatcggatgtattttcatcgggaaaaaagatggaaaagaaaagaaactttatatttacaatgtatgtgatcatcaggaatgctacaaagaggtgggctctcaggcaatctcttacacaacaggagttccggctatgatcggtgcgatgatgatcatgaacggaacatggaacaaagccggtgtatacaatatcgaagagtttgatccggatccattcatggaagcgttgaacaaatacggactgccatggaaaatcagtgaagatccggaattgatcgattaaatttgaagagagaaaaggtgaggagaactgatgagaagaaatgaacttccaacaccgtgttatgtcattcaggaagaacagctcagacaaaatcttgagatactaaaaggtgtgatggacagaaccggatgtaaaatcctgcttgcccagaaagcattttccatgtatgaggtgtatccgctgattgcgcaatacctttcgggaacaacagccagtggtttgtacgaggcgaaacttggggcggaagagatgggaattccgtttggaaaagagacacatattttttcacctgcctataaggaagaagaatttgaagagattttaacttactgcgatcacattgtatttaattcttttgaacagctggaacgatttggaaagagagcggctgaggcgggaaaaagtgtgggacttcgcattaatccgcagtattcaacactggaggggcatgagatctatgacccatgtgccgctggatcgaggcttggggtgacggttgagaaattcagaccagagcttttggaatatgttgatggtctgcattttcatacattgtgtgagcaggacgcgcagcctttgcatgacacactgaaagaagtggaaagacagtttggggaatggctgccgaagatgaaatggctgaattttggcggcggacatcatattacgagagagggctatgacatcgcattattggagcggtgtatttgtgagatgaaagaaaagtatgacttggagatttttctggaaccgggagaggcagtagccttaaatgccggtgtactgcttacgaaagtggaagaaattgtggaaaacagcatacagattgcgattttggacacgtccgcagcatgtcatatgccggatgtgcttgagatgccataccgtccgccgcttcaggacggctatgaggcggaggagaaggaatatacttatcgccttgcgggaccgacctgccttgcgggagatgtaatcggtgactattcatttgaggagccgctaaaaagaggtgatacactcacatttgaagatatggcaatctacacgatggtcaaaaacaatacattcaatggaatgcgtctgccggcaattgtattggaagataaggatggagaatgccgggtggttcgacagttcgaatacgaagattttaagatgagattatagaaatgaggaaacagttatgataggtattataggagcgatggaggaggaagtagctgcgttaaaagaggctatgacaattgaagaaaatgtcacatttgcgtctatggatttctgtagaggaacactgtgcggaaaagaagttgttgttgtcagaagcgggattggaaaagtcaatgccgcaatctgcacacagattttagtagacaaatttggggtggatacattgatcaacacaggaattgccggttctttagatgccaatattgatatcggagatatggtaatctctacagatgcggtagagcatgatatggatgcaagtattttcggagatccaatcggacaggtgccgcgaatggataccttttcatttccggcagatgaagagctggtagagaaggcgaagactgccaatgaggaggcaaacccggatattcacacattcgtaggacgtattgtgagtggagatcagtttgtatcgtcaaaagaagtgaaagataagcttgtagctaattttgaggcgaaatgcactgagatggaaggcgctgcaatcgcccatgcggcgtacttaaataaagtttcgtgtgtcattatccgagcaatttcggacaaagccgacaacagtgcgacgatggactatccggcgtttgaaaagcaggcaatcacacattctgtaaggcttgtgaagaatttgctgccacgcttataaaaaacatgtgacaaatcatgcaaaattcgtatgatttgttgttgaaatatgtaaaacgattcaagaacccaacttctttatttgctgtataatagcggtagcaataaatataaagaaggagggctctttttattatgttagagacattagtgcaaaatcaaattattttttatgcaatgggagtggcagcggggattggagttttaagcaagctggttgcccatattacattgagacgaatggtgaaagcagccagtagaatgaacaaaagtaaccataagctgatgagacttgtacgagcaaaatttgaacatgccagtatggtgagcgataaagtgcagaacgtggaagcatttgtgaaaaagtatgtttatgagtatcgtatttggggaaccagactccatacctttcgaaatttggaaaagaagatgacttggattgtagcagtattaggcgtagcgggaactgttgcggtatattatctgtatggatttgaggatcaagtgttcaaatatgcagcgtggactggagccagtgtggcgatactgtgtatgatacatatgtcaagtgacgaaaattatcatttacagatggcggagaattatatggttgattatttagaaaatgtctgtgcacatcgctatgccaaattgtataaagaaaaggctatgagccagacaagcatattggaaatggaagaagcgtttcagccggaggctgaggaagaagtggttgcagcagaggtggaagagattcaggaagagccggtttccgagcaggaacaggtatatgccatgaagcgggaagaaccggcaaaagaagaaaaagctgcagcggaagaaaaaagactgcaggaagtgcaggtgcgcaggattttagaagaatttttggcatagatgaaataaagcgattgcagcggagtaaataaagtacaaagctttgaaatggtgggggattgtgttcgcgatatgctatgtggcattggcagtaatattcaaattggataaaaagagatttttatagagactgaaaagaacatattgcttgcgcagtctatgcggatgtgctatattaaaggtacaaaaagaacaatcgccacataaaagtggttgaccaattgaaaataatttagaattaccacccaactcgtcaaagtatcagggtggtttttctatgtactaatgactgatcagataaatgaaggtcagtagtgataaaatgaacataccaaattgcattaagtctttaaagtcaaaatgtttattgttcatcagctccacctcccatctataaaagagtgagaggtcagccaccctatatcacgattgttctactcagagtgtatcacatttgtacaagggaatacaattgtgaactgatattcataatttcttgactttcccctcttccgtttggtagaataacaatagctatgagaccaattagaagggaaggataaacgtgggaaataaagtcacatttgactattcaaaagcaagtacatttgttgcagaacatgaagtagattacatgagcaagttggcgatagatgctaaggaactgctcttaagcagaaaaggagcagggaatgatttccttggatggattgatttgcctgttgattatgataaagaagaatttgtacgcattcagaaagcggcagagaagattaaaaatgattccgaggtattgctcgtaatcggtatcggtggttcttatctgggagccagagctgcaatcgaatttttaagacatagtttttacaatgttgtttcaaaagagattagaaagacacctgagatttattatgttggcaacagcatcagcagcacatatctcaaacatctgatcgatgtaatcggagacagggatttctctgtaaatatgatttccaaatcaggaacaacaacagagcctgcaattgcattccgtattttcaaagagatgttggagaaaaaatatggaaaagaggaagctgcaaagagaatttatgcgacaacagataaagcgagaggatcattgaagaaccttgctaatgaggaaggatacgagacattcgttgttccggatgatgtcggaggacgtttctctgtattgacagcggtaggtcttcttccaatcgcagtaagcggtgcagatatcgagaaattgatggaaggtgcacaggctggaagaaaagaagcattagaaaatgattttgctgaaaacggtgcattacagtatgcggcaatccgtaatattttacaccgtaaaggaaaagcagttgaggtacttgcgaactacgagccaagtcttcactatgtgtctgaatggtggaaacagctttacggagaaagtgaaggaaaagaccaaaaaggtattttccctgcctctgtagatttgacaacagatcttcactctatgggacagttcattcaggatggaagccgtattatgtttgagacggtattgaatgtggagaaagcaacagaggagcttttcatcggagaagagccagtggatttggatggtctgaactatcttgcaggaaagacagttgatttcgtcaataagagtgcgatgaacggaactgttttagcacatacagatggaaatgtaccgaacttaatggtgacaattccagagcagaacgaattctatcttggacagttattttacttctttgaattcgcttgtggcgtgagtggttatattttaggggtgaacccatttgaccaaccgggtgtggaaagctacaaaaagaatatgtttgctttacttggaaaacctggttttgaaaaagaaagagaagaattgttaaagagattataagaaaaaaagccagagttgcaacggagcagctttggctttaaatgtaaaaaaaggaagtgataagttgttatcgaatcaaatattgcacaagcccatcaatgatatacatgagattatgggggtggattgttccgtgtggagtatggagggaaagtgccttgccattgcgggaatgaacgaggatagaattaaggctggagtagacaaatttctgaaagaaggaaaagatgagcaggtatgtgaaaatgaggcatttttcctgattcgagataactatgatgcagtgtatgtccttgcacttcatgaggttgtagagcaggttgcggttatcggaaggctttgtatcagtcagttccaaaacctgatacacgcatataaagaacgtttggataagaatcattttttccagaatttattgcttgataatcttctgcttgtggatatttttaatcaggcaaaaaagcttgggattgaagtggagcgaagaagagttgtattcttgattgaaccgaaaaatgagacggacaatattgttcttgagacgatgaaaggtctctatgcaaccggctctaaagattttgtaacttcagtcgatgaaggacatattatcctgatcaaggcgttggagacgaccgagggatataaagaactgaatatgattgcaaaatccattgtcgatacattgacgatggaagcgatggtaaacatgagggcggcatatggcacgattgtaaatcagctgcgagatgtgtcaaagtcatacaaagaagcgggcatggcgctggatgtgggacggattttctatgagcagaaaaatgtccttgcttacaatgagctgggcatcggccgcctgattcatcagctcccggtatctttgtgtgacatgtttttacaggaagtgtttgacggaaaagcggtggatcagttcgatgaggagactctgagtacggtcaatcagttcttccagaataatctaaatatctcggaaacggcgcggcagctttatgtacatagaaatacattggtataccgtcttgagaagattcagaagctgacagggttagatgtccgggtatttgacgatgcgctcacatttaaaatcgctatgatggtatcgaatcatctgaaattcttgcaatcaaaagagtag

SEQ ID NO: 140 - DNA, 13849 bp, unidentified
  source 1..13849: mol_type = unassigned DNA
  misc_difference 7798: note = a, c, g, or t
  misc_difference 7799: note = a, c, g, or t
  misc_difference 7800: note = a, c, g, or t
  misc_difference 7801: note = a, c, g, or t
  misc_difference 7802: note = a, c, g, or t
  misc_difference 7803: note = a, c, g, or t
  misc_difference 7804: note = a, c, g, or t
  misc_difference 7805: note = a, c, g, or t
  misc_difference 7806: note = a, c, g, or t
  misc_difference 7807: note = a, c, g, or t
  misc_difference 9192: note = a, c, g, or t
  misc_difference 9193: note = a, c, g, or t
  misc_difference 9194: note = a, c, g, or t
  misc_difference 9195: note = a, c, g, or t
  misc_difference 9196: note = a, c, g, or t
  misc_difference 9197: note = a, c, g, or t
  misc_difference 9198: note = a, c, g, or t
  misc_difference 9199: note = a, c, g, or t
  misc_difference 9200: note = a, c, g, or t
  misc_difference 9201: note = a, c, g, or t
  misc_difference 10152: note = a, c, g, or t
  misc_difference 10153: note = a, c, g, or t
  misc_difference 10154: note = a, c, g, or t
  misc_difference 10155: note = a, c, g, or t
  misc_difference 10156: note = a, c, g, or t
  misc_difference 10157: note = a, c, g, or t
  misc_difference 10158: note = a, c, g, or t
  misc_difference 10159: note = a, c, g, or t
  misc_difference 10160: note = a, c, g, or t
  misc_difference 10161: note = a, c, g, or t
  misc_difference 10484: note = a, c, g, or t
  misc_difference 10485: note = a, c, g, or t
  misc_difference 10486: note = a, c, g, or t
  misc_difference 10487: note = a, c, g, or t
  misc_difference 10488: note = a, c, g, or t
  misc_difference 10489: note = a, c, g, or t
  misc_difference 10490: note = a, c, g, or t
  misc_difference 10491: note = a, c, g, or t
  misc_difference 10492: note = a, c, g, or t
  misc_difference 10493: note = a, c, g, or t
atgaaagttgtaattcttgccggcggctatggcacgcgcatttcggaagaaagcaagttcaagccgaaaccgatgatcgaaatcggcggtatgcctattttgtggcatatcatgaaagagtattcttactatggcttcaatgattttgtgatctgcgccgggtacaagcagcatatgatcaaggagtggtttgcggattatttcctgcataccagcgatgtgacctttgacttcacccagggcaacgagataatcgtgcatgaccagcacgccgagccgtggcgcgtgacggtggtggataccggcctgaacacgatgacgggcggccgcatcaagcgggtgcagaaatatatcggcaacgaaacctttatgatgacctatggtgatggcgtctgcgatgtgaacattgccgaactggtcaagttccataagcagcatggcaagctggcaactctgaccgccgtggtgcaggaacagcagaaaggcgtgctggatatcggccaagataacactgtacaggcgttccgtgaaaaaagcgtcaacgatggggctatcatcaacgcgggctatatggtgctggaaccggaagtgtttgataccatcagcggtgatgataccatttttgagcaggccccgctgcgcgagctggcagccaaaggccagctgatgagctatgtgcaccgcggattctggcagtgcatggataccgagcgcgaaaaaagtatgctggaaaaaatgtgggcgtccggctgtgcgccctgggaagtgtggaaccaacaatgaacttggaattttaccgcggcaaacgcgtgtttgtaaccgggcataccggttttaagggcagctggctctgccgcatgctggtgggggtcggtgcggtggtaacgggttacagcctggaaccgcccacaacccccaacctcttctctctggcagggctggaaggcaaaatgaccagcgtgatcggtgatatccgcaattttgccgccctgaaagcggcctttgatgccgcccagccggaaattgtgctgcacctggcggcccagcccattgtgcgggacagctacaaggacccgcgctatacctatgaaaccaatgtaatgggcaccgtgaacctgttggaatgtgtgcgcgccgcccaaaccccaccgcgctctgtgctgaacgtgacgacagataaggtgtaccagaataatgaatggtgctggggctaccgcgaaaacgaaccgttggacggcttcgacccctactccaacagcaaaagctgctcggagctggtgacccacagctataaaaacagcttttttgcggatggcagtgtggccatctccactgcccgcgcaggtaatgtgattggcggcggcgattttgccaatgaccgcatcatcccggactgcgtgcgcgcgatggcaaaaggggagagcatcggtgtgcgcaacccgtattccacccgcccataccagcatgtgctggaaccgctggcggcgtacctgctgatcgcccagcgccagtatgaggataaccggtacgccggctattataacgtcggcccggatgactgcgactgtgtgacgaccggcaccctggtagacctgttctgccaggcgtggggcgatggtgctgcatgggaaaaccgcgctgaggcaaacgccccgcatgaagcaaactttttgaagctggattgcagcaaattgaaatccaccttcggctggaaaccgcgctggcatatggcggaatgtatgcaaaagaccgttgcgttcagcaaggtatggctttccggcggggatatcccggcggagatggacaaagagatcaaggaatttttgagtgagtaagggagcagacgatggcaaattggagcaatgaggccgaagcccgcgagcagatcaaggcgctggtggcagaatattaccatgactttaaggagaaaaaggcggatttcaagcccggcgaccgcgttacttatgcatcccgcgtgtttgatgaaaaagaaatgtgcgccctgaccgatgcaacgctggatttctggctgaccaccggccgctttgcggatgaatttgaaaaagagtttgccaagtggatcggcgtaaagttcgccaacctggtcaactccggctcctccgccaacctgattgcctttatggcgctcaccgccccggaactgggcgaccgccagatcaaaaagggcgatgaggtcatcactgtggcatgcgggttccccaccactgtcaccccggcgctgcagtatggcgctgtgccggtgtttgtggatgtaaccgtgccgcagtacaacattgatgtgaccaagctggaagccgctctttcccccaagaccaaggcagtcatgatcgcccataccctgggcaacccgtttgacctgtccgccgtcaaagccttctgcgatgcccataacctctggctggtggaggataactgcgatgccctgggtacccagtacaccatcaacggcgaaacccgctttaccggaacctggggcgatatcggcacctccagcttctacccgccgcaccacatgacgatgggcgagggcggctgcgtgtatacaaacagcccgctgctgaaccgcctgatcaagagctaccgcgactggggccgcgactgcatctgcccgtccggccatgataacttctgcggccaccgctttgacggtcagtatggcgaactgcccgcaggctatgaccacaagtacgtttacagccactttggctataacctgaaagtgaccgatatgcaggccgccatcggctgcgaacagctgaaaaagttccccagctttatcgagcgccgccgccataactgggaccgcctgcgcgcagccctggaaccggccgccgataagctgatcctgccggaaccggccgccaacagccgcccgtcctggttcggcttcctgatttcggtcaagccggaatccggcctggaccgcaacgccgtgacccgctatattgaggaccacaatgtccagacccgcctgttgttcagcggtaacctgatcaagcacccctgctttgaccagatccgcggcaccgacgcctaccgcgtggcaggggagctgaccaacaccgactttatcatgaacaacaccttctgggtcggcgtgtaccccggcatgaccgatgagatgatcgactatatggcgaagatcattattgaagcggtgaaccagtaaaaagcgctgataagatgaatcaataagaaaaagcaaagccgtgctgataagaaaaaatggctgctgcactgcggtaaattatcaatacaggctttgctttttgattgcttataaagaataataaaggaacgggatccatgcagaaattgttggcactgttgggagcaaaaagcaaagaggaatttgttgcgctgcttgcacagtttatcaagtttggccttgttggcgtaagcaacacggcggtatcaatggcggtgtattatatctttttgtggatcagcccagacctgtatatggtaggcagcgttctgggaacaattctgagcattgccaatgcctttttttggaacgataagtttgtgtttaccgggaatgcaaacgattggcgcagtaaactgaaacgccttggaaaaacatatgtcagctacggcggcacgtcgatcctttctaatgttttgctttggatagaggttacgttcttcagcgtaagcaaaacgattgcgccgattgtaaatttgctggtcacgattccgctgaattttatcatcaacaagttgtggacatttaaggaaagataaacgacaaaatgtttcccgtcaacgatgtggagcttatccggcacggaaaagtgcggtatcgggatccctaaccatcatccgactcaacgaggttggttggcggtgctttattgttgaaaataagactgcaaaatatatcggtaaaaaatatgggaaaccagggaatatctgatacataaccgggaacagaaatagggcaaggctgtgtatggacaacatgacaacaaataacgagaataaatctggtatcagcactggattagatcagctgttgccggaagataacaaatcggtgcagctgggactgaattatggccagaatgaatgcaacagccagcgcgtgctgaaagagaataacacgaaatggggaaaaggcctttttggtaaaaaaggaagagggagtaatccgttctggaaaaaaacggccaagctgtactgtgtactcagcgcagtgtgtgccattgtggttatggtaacgctgtatgttacccatggtgattttctttcgtactttttataccatgatacactggatgccggcatggattttttccatagcattgaatatgttcgtggacgccagccgtatgcggtgtttgacacactgtatccgcccttggcaaatttgttcttttatgccctgtttttactggtgcctgcttcggtatctgataactggacctatgactttgaggcgtcagttgccatgcgcggcacagaaactgatttacgcacaacacagtcgtgctttttgctatacgtcttttttgtggtgctggcggttcttttgctggcggttttgctccgtgacgtgatgcaaaatgcccagtgggccagggccagtacgttttttgccttgttcagctttggtgtgcttaatgcggtagaccgcggtaatattattttgctggcggcggggctttcgctttttttcgtcatgtatcaccgttcaaagcgcgcatgggtgcgggaactggcattggttgcactggcagtagcagccggacttaaaatttatcccgcattcttaggtgttatgcttttaagaaaccgggatttcaaagcagcaatccgcacggtgttttatggcattgcagcgttggtgctcccggtgtttgccttccaggagggcgtgtacggcttgcagctttggctgaagattttgttctcttttggaagtaaaagtaaaacaccttgggcaggcaatggcatcaacagcatgttcgcacatggggcgcatctggtggacctgattgccggaaccagcaatgcaacggtatctttttttgcagcagcctttgctgtggcggcggtactggttgtgtgtgctctgctctgccgccaggaatggcaggcgttgctgctgattaccgtggctatgatgtaccaaagccagggcaactatatttactgcatggcgctgattccgctggcgtattttcttgcacaggaaaaggtgatgacacgtcaaaatatattgccttttgtggttttgatggtatttaatctgccgcttccaatctttgaagagcgtaactcttatattcgcaacaccattgtacagttggcaatactgacagctatcatctggggcgttgtacaggcagtaaattgtgtgttggcagcgctgaaaaccaaaaagcctgaacaatcaaaactagataaaaaagctgcacgcagcacgctggttactttcggcgcttcactgggggcattggcagtttcccttgccgttttctatggcgtgtgggtgctgtataatgcgccgtctattaccatgcagctgggggatggcatttataacacagaatattatactcctgaaaactccaacaaagagctaccgttttactggtgcaagaaaagtgcggagatcaaactggtaaacccgcagctgaatacggaaaggtacacctttacctttacagttggggattatttctttgatatttctgaccgccccagcattaccattaccttcggtgacagtagccagacctttgtggtcagccaggaaaacatgaaaatccgctataccgtggatgttccttttggtgaaagtgcaatcgatattagctacagcggcaagcgggttgatgccccgcaggattccagaactttgtattttgtaatggttcagccgcagcttgaacggattaaataaaaggaggacactctcaatgaaacagcgtctggccgattatgtggccgattttcttgcggcgcacggcgttacggatgtgttcagcgtggtgggcggcggcgccatgcatctgaatgatgcactgggccaccacccggcgctgcatgttacctataaccatcacgagcaggcaagtgccattgcggcggaagcatacgcccgcattgataacaaaattgccgccctgtgcgttaccaccggccccggcggcaccaacgccctgaccggtgtggtgggcggctggctggattctatccctatgtttgtaatctccggccaggttcggtacgataccacggcccgctatgccgcgcagtttaccgatggcctgcccctgcgcgcggtgggcgaccaggaatacgatatcaccaaatctgttgcccacatgaccaaatacgccaccatgctggaagacccgaaccagatccgctatgtgctggaaaaagcctggcacctggcaaccaccggccgccccggcccggtgtggatcgatatcccggtcaactatcagggcggctacattgaaaccgacagcctgcccggctatgactcggcgcaggacgatgcccggctgccgcccccggtggacgatgccaccgtgcagatggtgctggaaaagatccgccacgccaagcgcccggtgttccacgccgggtacggcatccggctttccggcgggtacgcagcgttccgcgccgtggcggaaaagctgaacatccccattgtgacctactggaacgccgtggacctgatcgaggacgaaaacccgctttactgcggtcgtgccggcaatatgggcgaccgtcccggcaactgggccatccagaacgcagacctgattctggctgtgggcacccgcatttccatccgccaggtgggctataactggaaaacctgggcccgcgcggcggaagtcatcatggtggatattgaccgcgccgagatgaaaaagcacaccctgcatgtggagcaccccgtgtgggcggatgccaaggactttctgcaaaagctggatgccgccgcagcgccgctgacccctgtcagccaggcagcggactggctggcaacctgccagagatggaaaaaagattaccccgccgtgctgccgcgccagtgggaagaaaacggcaccaccgccaatgtgtacgcctttgtgcgctacctcagttcccgcctgccggaaaacagcctgaccgcagtttccaacggcgcctgctgcgtggtgggcaatcaggcgtatgtcatccaaaaaggcagccgcatggccaacaacagcgccattgccagcatgggttacggcctgcccgccgccattggcacttgcattgcaggcgtaccaccatctgcctggaaggcgatggctctatcatgatgaacctgcaggaattgcagaccatcctgacaaataagctgccgatcaagattttcctcatcaacaataacggctaccactccatccgcctgacccagaacaacctgttcaaagaccattgcaagatcggcattgggccggagagcggggatctgtccttcccggagttccgcaaaattgccgaagcgttcggctacccgtattcctgcgcacattccaacgctgagatgaaacaggtggtggatgccgcccttgccgcagaaggcccgactttctgcgagatctttaccgatacccagcaggtctgggagccgaagagcgccaccaagcgcctgccggacggcacagtgcttcgcatcagcgttctgcgccagacgctggcggtcctgcttctgggcatgctccagccgattctggttgttgcgcttgccgccgtaattctaagcgcgcttctnnnnnnnnnnggacggcacactggtcagcccgccgctggaggacctggcaccgttcctgccgcgggaagagctggaaaagcagatgtttatccccctggtgccggaagggtaagaaaataaaaaatgaaaaaagcgcggaatggcaatattgaattgctgcggtttgtattttgcgtgggggtggtattgttccatgcgtggtacgtgcgcaggggatatatcggcgttgaattcttttttatcgtaacagggtattttcttgccgaaaagatatgccggttaaacgcaagagaaacaacctgcccttcgctagaaaatgccatgaaagaagcgacatgggatgtgctcaagcgttatcgtttgatatttccatactttcttgtggcaaccgttttggggtttatagtgcgtgcctatgcacaacagtgggacagcgctacaattctgttgaatttacagctgattccggcagatttcctgtatttacagaactttgggttttctgtagcctccacaacaggggtgctatggtatctttccgcaatgacttttgcggtctgggtgctgtatccgctgctgcgcaggcattatggcttgactgtgcaggcgaccccggcagcaatcctgctgatactgggcgtgatcctgcagaactgtggttcactggatgccccatgtacacttctgtttggctgggttaataccggaatgctgcgtgcctttgcaggaattctgggaggggtagtagcaaacagggttgcatcaactctgaaaaaaattgatgtagggaaaaagatggccgcgatgatgacagccgtggaattggctgggtatgcgtgggtactttaccatatatggtcaatgaatgagacacgtgctatgctggatggcattgtggttttggcgttgggtgcggcatttaccattacggcaagcggaaaatcgcttttctacggaaaatttgacaacggctttgtcagatttctggggaaagcaaccatgccagttttcttgagtcatttgtattgcgtacaatttttgccgaatatactggcaatgtacagcgtagaagtgaccgaactgcaaaggcttgttctttcttttgcctgctgtgcaatagcggcaggaattgtctattatgtagggaaaattatagacaggcaaatgaaaaaaagctggcatgctttttgcacagagatcattgcgaaaaacaaataaggtgttgaaaatggaaaaaatcgaaaggcagatacaaaccgcaatcgtaaccggccccaccggggccgtgggcacagcattgtgcagccggctgctgcaggccgggtgtaccgtggtggcggtctgccgccccggcagcccgcgggccgtagcgctgcccaaggatgcaaacctgnnnnnnnnnntgtatgtagttgcctgcgatgccgccaacctggcggatttgccgcagtgcatggccgcagccgggctgcccgtgcaggcggatgcctttttccacctggcgtgggcgcacaccattggcgcgggccgcaatgatatgccggctcagattgagaatatccgctataccattgatgccgtgcgcaccgcggcggcaatgggctgccgtgtgtttattggtaccggcagccaggcagagtatggccgtgtggacggtgttctgcgggccgatacccccacaaaccccgaaaacgggtacggcatggccaagctgtgtgcaggccagatgagccgtaccgaggccgccgccctgggtatggaccatgtgtgggcgcgtatcctttcggtttacggcccgcatgacggccccaacacgatgatctccgccaccatccaaaaactgctggccgggcagtgcccggacctgacggcaggggagcagaagtgggattatctttactccgccgatgctgcggatgcactgtaccgcatggcctgccatggccgcagcggtgccgtgtacccggtgggcagcggcaccgcccgccctctgcgggaatatattgagaccctgcgtgatgccatcgacctggccctgccgcttggcctgggcaaaatcccttacgggccgcagcaggtcatgtttttgcaggcggatatcacccagcttgcggcggataccggctttacgccgcgcaccgcctttgccgatggcatccgcgccaccattgcgtgggcaaaaacgcaaaagcaaaccaattaagccaataaggaataatcccgtccgtgcgggcaggacccgcatggacgaacaggagccagacagtatttatgcagttgacctaccaaaagttaaagccgtttgccttatcctatctcaccgcgccgctggcggggttttttgcggggtatcnnnnnnnnnnccgcgcgccgtttgccgttgcgggcctggccgtgctggcctttgcctggtggtatgccgtgtgcaaaacgccgcaggttaagcaaatggggcaagaagagcagggcattacgctttcggtgccaaagctggtgctgctgtttgccctgatgctgttgtggggctacctgggcggtcagacgggctttttttaccagaactcggactggggttaccgcaacgccatttaccgggatctgatcacaaacagctggccggtgtattacccgcaaaaggatacggcgctggtgtattatatcgggcactggctggtcccggcggcgnnnnnnnnnnccaaaccggtatacgccctgtttgggctggatgccgcctggatgttcgcccgtatggccctttgggggtggacggcgctgggcacctatctggtggcgctgaatttgttggtctacctgcgtgccgataccggcaaaaagcaggggatcggcctgctgtttttgattttcttcagcggcatggatattctgggcgcgctgtacagcagccgactgccggacctgctggcctatgacgctatgcacctggaatggtggacgaatgatttccagttcagctccctgacgacctgcctgttctgggtgttcaaccagacagtgggggcatggctggcaaccgtctgctttttgcaggagaaagactgccgcaactacctgctgctgggcacggcctgcctgatgtgcggccccttcccatttgtggggctggttatttttatggtggtgcgcggcattgttctgctggcacagcgtcaaaaaggcgtgctgcaatcggcgttctccccggccaatgtgctggtgctggttgtggtgctcagcattacggccagttattttttggccaataacgcctttggctacagcgttctgggcgaaactgtcgccgggaaccaggcagcgcagcagacttttggccaaaacgttctgaccagcctgcaaaaaggcatgctggtattttacctgctggatgccggcatctatctgctgttgctctggcggcagaaccgccgcagctggctgttttatacctgcgccgtgtcgctcttcatcattccgttctttaaggtgggacaggggtgcgatttctgcatgcgggtgtccatcccggctatctttatcctgatgaccctctgtgcccggtactttatcgccttggtgggcaccaaatggcgggacggtacgcttgcacagcatgccgtgaccattctgctggcggcaacgctgctgatcggtgtctgcaccccggccatggaaatttaccgcggcatctgccacattgccaaagaggggacgttctgcctggaaaacgaggagccctacaccctggcggaccgccctgtaagcctgaactttgaaacgcaaaactgcgaaaataaattgttctttacctattttgcaaaatagtgtatagtgataagggtctgcccggctattgcggcagtgggccaaagactaaacttaaaggaatgaaacctgcatgagcgagaagaaaaaagtcatctctgttatgatccctacctataacgaggaggagaacgcccgccccatctatgaggcggtgcgggatgagattcggaaggactgcccggattatgactatgagatcctttttattgataataaaagccaggatcgtacccgccggatcattacggacatctgcgcgcaggaccccaaggtcaaagccatttttaacagcaagaactttggtcagttcaacagcccctattacggtatgatccataccacaggggactgtaccattaccatctgcgcggacttccaggacccggtggagatgattccaaagtttgtggctgaatgggaaaaaggctacaaaattgtaatcggcaaaaagaccaccagccaggaaaaccctgtcatgtactttttgcgggattgttactacaaaaccatcaaaaagatgagcaatgtggaaatgatcgagcagtttaccgggtttggcctgtacgataaaagctttatccagaccctgcgtgatttgcacgaccccaccccgtttttgcgcgggattgtggcggagcttggccccgagcgcaaggagattgaatacacccagcccaagcgccgggcaggcaagacccacaacaactggtacagcctgtttgatgccgccatgctcagctttaccagctacaccaagattgggatgcggatggcggagttcttcggctttttctgcgcggcggtcagctttatcctggggcttgtgttcctggtggcaaagctgatccactggaatacctttgctgcgggttatgccccgatgatcattgccgtgttttttgtgggtggtgtgcagctgacctttctgggatttttgggcgagtacatcatggcaatgaacgcccgtattatggaccgccccctggtggtggaagaaaagcggctgaattttgaatccgaaacgccggaaagtgatactacccgcgccaagtaagaccgagtggttataatagattgcgagttgacagtaaaacaatgattccttttaatattcccccgcaggttggtacagagctggactatatgcgccaggccatggcaaacaataagatctgcggcgatggcccttttacccgccgctgtgatgaatggatggaacagcggttccatgcgggaaaggtgctgctgaccaccagcggtaccaccgcgctggaaatggctgccctgctgtgcggcatccagcccggcgacgaggtgatcctgcccagctacacattttcttccacggcaacggcctttgttttagctggggccaagctggtgtttgtggatatccgcccggacaccatgaacattgacgaagcaaaaattgaacccgccattactgaaaaaaccaaagtcatctgcgtgatgcactatgccggtgtggcctgcgatatggataccatcatgcagattgcgcgccgccataacctgaaggtggtggaagatgccgcccagggcgtgatggccagctataagggcagggcactgggcaccatcggtgattttggctgctactctttccatgagacgaagaacttctcaatgggggaggggggcgcactggtcatcaatgaccccgaaaccgtgaccaaggctgaaatcctgcgggaaaagggtaccaaccgcgccagttttctgcgcggccaggtagataaatatacctgggtttcttatggatccagctacctgcccagtgatctgaatgccgcttacctgtgggcacagctggaacaggccgataccatcaatacagaccgtaccaacagctgggattattacgcacaggagctggcaccgctggctgaagcaggcctattggagctgcccaccgtgccggaaggctgtgtgcataacgggcatttgttctatgtcaagctgcgggacctggaacagcgcaccgcgttcattgcttatttgaaagcccacggtgtggcatcgtctttccattatgtgccgctgcacagcgccccggcgggcatccaatacggccgctttgccggggtgggtgaatacaccccaaaggaaagcaaccgcctgacccgcctgccgctgtactatggtctgaccgaagccgaccgcgcagccgtggtgcaggtggtcaaagacttttttgcacagaaataa

SEQ ID NO: 141 - DNA, 9691 bp, unidentified
  source 1..9691: mol_type = unassigned DNA
  misc_difference 7257: note = a, c, g, or t
  misc_difference 7258: note = a, c, g, or t
  misc_difference 7259: note = a, c, g, or t
  misc_difference 7260: note = a, c, g, or t
  misc_difference 7261: note = a, c, g, or t
  misc_difference 7262: note = a, c, g, or t
  misc_difference 7263: note = a, c, g, or t
  misc_difference 7264: note = a, c, g, or t
  misc_difference 7265: note = a, c, g, or t
  misc_difference 7266: note = a, c, g, or t
ttatattcccccctttaaaagtaatttcctctgaggtttaaacaccatatagttgaataccagaaacaccgtagttcctaacagggcaaaaaacgaaccgatcaatgccgtactttccagccctgccccatgttcgatcgacaatcctccaaaataagcccccacggcattccccaaattaaaagcaagctggaccatcgccccgcccatcatctctccgccaggagaatattgaagcaacaacaattgctgtggagaagaaactgcaaacaggcaaccagtacaaacgcacatcagcaaagcggacaaaaagccgtacgaagcaaaaaaataaatcagcagaagtgatgcaaacatcagaaactgcatggacatcgctacgataccaggtgtaaaacgatcagacaaatgccctcccaaatagttaccgacacacatgctcgcacccgccagcaacatcaatacaggcattgtcccgacactgaaaccggacacctccgtcattaacggattgacatagctataccaacaaaaagctcccccgtttcctaacatggtagcagcaatcagcatccacggttccggccttctcaaaaaacgaaactgccctttcagattcgtcgccggcagggcgggcaaaacaggaacccacctccggataaaccaaatcgttacgccaccccacaacgctgcaatcacaaaaaccaaacgccaggacagaaagtaccccaggaaattcccggccgggacaccgaacaaattggcaatcgtcatccccataatcataatagctacagcagaagtgcttttccctttctccgccaaacggctggcaacaatcgaaccgactccgaaataagccccatgcggcaaccccgatacaaaccgggcacacaaccccatccaataatcggccgacagagccataagcagattcccggcaacaaaaagcccaaccaaagcaagcaagatcgtacgtagcggccaactcctggccaccaccactaccaacggcgctcccacacatacccccaacgcataagccgaaataagatgaccggcttcggataaggaaatatcaaatcctgccgccacatccggcaagatactcatcataataaactctgcaatccccaacccaaatgtgccaaaagacaatgcatacaaacctttcttcataacctaattcaatctttctgtttttccggccgcaaagaaacaacaaaattattaagtgtaattgtcgcagattatgcaattattgtctaattttactgtgttttatcagaaagttcatccgacatgcacgagaaactaaaattcgaacaaatcaaaaaagatagttgtgcctcattacgctacgattattccagcttgtacccgaaagacgaaatgcctcttcattttcatcccgaaatagaaatatgttatgttgtgaaaggttcaggctaccggatgataggcgactttctggagccgttcgaggagggagaagtcgtactggtcccgaccaaccaaccacattgttggatgtataaccccgaaagctgcgagcctgatggaaaacggagatgcatagttgtgcaattcaatcccgacttgctacaaaccggcctgtctttttttaccgaatgggaatatgccgctcaccggttatcggcaattcagcaaggcatcctgctgacaggcgaaacagccggaaagatcaaatcctgcttagaagaaatgaacctcctgaatgcaagcgaaaggatgctgatgttgatccgcatcctgcaacaaatcggaaccacaaccgatttaatccctatcggtttgcaggaaacggtattcaacggcattaccaaaaacatgcaacgcatgcaactgatcttcaaatacgtcatcgagcattacaaggagaaaataactctttcggacgccgcaaacgtaatcagcatgagcacaacagcgttctgctcgtttttcaaacgtgaaacaggcaaaacgtttacaaacttcatcaacgaataccggatagaggccgttggcactttactccgcaactttccggataaggacattaacgaaatagcctggcaatgcggcttcaccgacattccctacttcaatcgctatttcaaaaagatgaaacagatgactccgaaacaatggagatacgaaatacaataaaaaaaagaatatcctaatatgaatgcagaaattatccgattcttagacgatttacgacgaaacaataataccgtttggttccatgaaaatagagaacgatatgacaaacttcgctgtgcttttatcaacgaagtacaagagttaatcgaacgaatcagcgtatttgatcctgatatacggggattggatgcccggaaatgtctgttccgtattaatcgcgacatccgcttcagcctcgacaagtcgccttacaagacttatatgtcagcctgtattgctcaaggaggacgtcatagtatccggggagcttactactttcatcttgaaccggaatactgcgtactgtccggtggtatctggtatcccaaaccggaaatattgaaagtccttcgacgtgaaatatacaataacatagatgaatttgtttccatcatcgaagagccttccttcaaagctctgtacccgtcactcgaaggggacatgctaaaacgtatcccggccggtttcccctccgattctccttacggccatatattaaggcacaaagacttcagcgttatcggtattaagcccgacaggtttttcagccagccggactggatggaagaaaccatcgattgttttcgaaagcttcttccattcaaccgcttcctgaatgaaattgtggatgaatatatgggaaatctgtaaaaatactattttccgcaaatatccttaaacggacaatacatgcaggctttgccgttcggggtttgcacgaatggggtttctgtgtcgaagatttcatccaagcaatttcgcaggctgtcttcaaaatccgtgcgatagttggcgaagtccaaaacctgttctgttttgaaccggtctgtacgatggtaaattccaggatcgaaagaggaagaaaagagggtcctcatataatagatacccggctgaatagcagttgaaagctgaactgacctgttatacatccatgcatacataaagacctgcataaccgctttggaacgatccgtatctgctttgtcgaaaagagcttctacagaggtaaactgcgtcgtcccgcccccactcttatagtcaataatgcggacgacatcgcgtacttcgtctatacggtcgataaatcctttcaactggatattgcttttatccgtcaatggaaaaaggcattttatcttcttttccgattcgatataacggaaaggagtctgttttgcgtcacgttccagcactttctccacatatttgcgaatcatctcgccgatcaggaagttttgtccggtgagtggacgaacaatgtccgttttaaagaaaatttcggcaaaggcacgggcaactgctcccgtcaacataggcgtatcttttcggatcgctttcagcagatcagccgtcaccatctttccacagaatggctgatacaattcttccatcaccttatgcaggatacttccaaaaacattactttcgatcgtctcgcttacctcctcttcttcacgtattccctcgacaacggagaaatagaatttaagcggacaatccagataggtattgactgcactcgccgatatcgcccgcgtcccgccactccggaaatcagccagacggttcatgacttcctccgtcttagctacctgcaaggcaggagtcttggaagaagagacattgtaaacaaccaacttattctgtatcggctcctcataatgataatgcaactgatacacgaaacggctaacctcgcctgtctgcaatccgttgcttcttgtatcataaagcagactgacatggctggcacgataaatcaaacgatagaaatgatacgcccaaacactgtcctgatgttcgtatgtcggcaaaccgaatccacgacgaagattataaggaataaatgaattagccgctttcctcaacgggaaaattccttcattcatcgaaaggataatcaaccggtcaaagtcaagcgcacgagtctccaaaacacccatgatctgcaaaccggaaagaggttcaccatggaaaggaatcgtaattgtgtccgtcacacgtttcagcaaacggaaataggtgtcgattttcatttctacattcgcctcccgcatgacttccttcatccggttaaccgtagcgaaataatggaagataaactcctgttcgatgtcgttaatagttgaaagttgagagttgaaagttgaaagtggctccgtgtcactatttacactttcaactttcaactttccaccttcaacagctttattcagttcctgcaacacgttaatcaaataatcggagaaagtttccaccgcagtcaccggagtaaagaggatggacaacaatggcgtcttattcagatcgtcatacgatatgtaaatcttgttgttttctgaaatattttttaccagattagaaaccacctccggagaagtagtcgagatataccgatggttcaggattggcaagacatcccggaaatagaacaccggcctccggtccacataacgaatattcttttgcaaagccagaatatattccatcaaagatgcgaccggtgtaccggccaacggatatcccatcgtcacattgatccgtttgatctgttcgggaatggcattcagaaccggaatcaacaaatgttcatccggcagaatcacagccgtccgcaacgcttcttccgcactcatttcctcttccttgcaaagctcgttcagaatgctgcacacttgctttgcctgtccgattccggaagggatgccgatcacctcgatcttctttttgtcgtcatcttcattgtcaatagtcaattgtccattttcaattaattgcgacgggaattgccgcaaattgcgctccacgaagtaagaggctttattatctgggtccgtcactttcggagaggcgtaatcccagtaaaaatcagctattccccgtttttgcaatccggaaaggaaacgttcttcagccaccgagagggcattcagtccgacaaatacaacctttgtatagggcaggtcgcaacattcgtctttctccatctgttcgacaacttcccggaaaatcataccttcatatcctttgccttcggtggcaagcgcttcccgcaaatcggtatatagggcatataaaatctgccagaccgccagaaattgttcctggttgggcgtatctcctttcgggtaaaaagaagaccaaaaagtccggatagccgcaatttgttcagggctcagaaaactaaaatcattctctatctcacgcaggtccgtcacattggtgaagagcatacgggcatctgccatatatttatcgatatcgtcgaaatcattcagcagcatttccccccaatacaagaactcgtcgaacgtttcggaagaaccgctatgtctcaaataaatatcatatagtttaaacagcatgctgatccgatcggcagcctgctttccgctcaactgtacaaacagatcgttgatcgtcaggatcgtcggcgagaaaagaggcttctcagatacttccgacaagtatttctggaagaacagcccggtacggcgattcgggaaaacaaaggccagacggctcacttccgccccgtattcagaataaaaaagggatgcaacctgatataagaatggtttcattaattgtttggattaataaatgatgatttatcagtgtatattactgtaatatattttctatcatttgtatttcttccgctgaaaaggctgtattttgtaacgccttcaggttatctatcaactgtgcaaccgaactggctcccaccaggacgctcgtcacccggtcgtctttcaacagccaggcaatcgccatttccgctaacgtctgtccgcgttgtttggcaaggtcattcagttgtcttactttatttattttttcttccgtcacctgttcacgttgaagatggcctgtagatttggccgcacgcgaattatcgggaataccgttcagatacttatccgtcaacatgccctgtgccaatggcgagaaggcgatcatccctactccttcctgcttcaacagaggcaacaagtccggttcgatcctgcgatccagcatcgaataacgcgcttgatggatcaagcaaggcacacgatgttctttcaatacggcaagtgctttttccgtctgtccggcagtgtaattcgatatcccgacatacagggcttttccctggcggacgatgtcagccaatgctcccatcgtttcttcgaccggcgtctgtgggtccggacgatgcgaatagaaaatatccacatattccaatcccatccgcttcaaactctggtcaaggcttgccatcagatacttgcgacttccccagttgccatacggaccaggccacatgtcatatccggcttttgtggaaataacaagttcatcccgatattgtcccagacctttcttcaggatacggccgaaattttcctctgccgatccatacacaggaccgtaattattggcaagatcaaaatgtgtaatcccattgtcgaaagcggcatacgcaatctgaataaagttactgaacacatctacactgccgaaattatgccacaatcccagagagatgaccggcaatagcaatccgctccgcccacaacgcctataagccatatcggcataccggttgtcatttgctttgtacatttccatataaagatatttttattacaatgaatcttttcagatatacaaatataatcaagaataccaaaagaacgggcaattcggataaaatgatcgcttctcggaggaaacaacatcaaccgggtataaacaaaaaaggctatcctcacggacagccaatcttcattgttaaccttaaatctaataccatgaaaaacacagtgcaaatatagagagtttatgttatgcagcataatatttccacaaaaaaaagctttctcttaacctgatttaaccatttcatgttttacaacataatttttcatacacttttgacttagtcattccctgcacaaacaacagacacattatgattgaaacagcctacaatactggataaaaacgatccaaatgcaaaagtaacgaataactcatacaccttaccattttttnnnnnnnnnncttctttcctaccgatctgctaatgatcggaaaattaattcttacttattgaaacgttctttcaatttagccaacatatcctgagtcatggaatccagatcatattccggtttccagccccattcctcacgggcacatgtgtcatccaaagagttaggccatgattctgcgatagcctgacgtaacggatccacatcatattccatctggaagtcaggaacatactttttgatgttgttgtagataatttcaggatcaaagctcatggatgcaatgttgaaagagttacgatgaacgaacttcgtcgaatcggcttccataatttcaatagctgcacgcagaccgtccggcatatacatcatatccatgaatgtaccctgcttgatcggacatacgaacttctcacctttggcagccgaataatagatatcaactgcgtagtcggtcgtaccaccacccggaggtgtcacataggagataagtcccggaaaacgtacggaacgagtatcgacaccgaaacggatattatagtagtcactcaacaattcgcctgaaaccttcgtgacgccatacatagtacgcgggttacggatcgtatcctgcggagtcttgtctttcggcgtgttattgccaaacacaccgattgaactcggagtgaatacagcacaatgcatttcacgcgcaacttccaatacgttaaacaaaccgcccataccgattttccaggcaagctgcggttttgcttctgcaacggctgacagcagtgcagccaagttataaatcgtatctaccttatatttggacacagtctcagcaatctgctgttcgtttgtaatgtcgacaattgcagaaggccctgattccagcagttcgcctttaggctcctgtccggggatgtaacctgctacaatgtttccaccgtagatacctctcaacttcatggttaactctgatccaatctgaccggtagaaccaattactaatacattcttcattgcgtttgatgttcttttaagttttttcgatggcaaaggtatagagaataaaaacattccggtatgaatttcttgtattttttagcctatatattcaaaaaaaatatgacctttgccacatcggcagacaaatcagagacaaagaaaaaatggtttcaagaataatattttgccacttgtctgcgataatagagatataattgtcaacttaattaaaaatactaacaaaaaacaaagttatgtacggtaaactgaaagatttccttactcaggaattggcaaacatcaaagctgccggattgtataagaacgagcgtatcatcaccactcctcaaagagccgacatcaaagtaaacgcaggaagcgacgttttgaacttctgcgcaaacaactatctgggcctgtctgacaaccaacgtctgatcaaggctgccaaagaagctatggacacacacggatacggcatgtcatccgtacgtttcatctgtgggacacaggatctgcacaaacaactggaagccgctatctccgactatttcaaaaccgaagatacgatcctgtacgctgcatgtttcgatgccaacggcggtctgttcgaaccgttgttcactgaagaagatgcgatcatctccgatgctttaaaccatgcctccattattgacggcgtacgtctttgcaaggcaaaacgctaccgttatgccaatgcagacatggccgacctggaacgttgcctgcaagaagcccaggcacaacgtcaccgcatcatcgcaacagacggtgtgttctctatggacggaaacgtggccccgatggacaaaatctgcgaactggcagaaaaatacgacgcattggtaatggttgacgaatcccactctgccggtgtagtgggcccgacaggacacggtgtggctgaacaatataatgtatacggaagagtcgatatcttcacaggtacgttaggtaaagcattcggtggcgccatgggcggattcacaaccggaaagaaagaaatcatcgacatgctgcgtcagcgctcccgtccttatctgttctccaactctgtcgctcccgctatcgtaggtgccagcctggaaatgttcaagatgctgaaagaaagcgatgctttgcatacgaaactgatgaacaacgtcagctacttccgtgaaaagatgttagcagccggtttcgacatcaagccgactcagtccgcaatctgcgccgttatgctgtatgatgctaaattatcccaggatttcgcagccaagatgcaggaagaaggcatttatgttaccggcttctactacccggtagtgccgaaaggccaggcccgcatccgcgtacagttgtccgcaggccacgaaacggaacatctggataaagcaatcgctgcatttatcaaagttggaaaagaactgaacgtaataaaataa

SEQ ID NO: 142 - DNA, 9532 bp, unidentified
  source 1..9532: mol_type = unassigned DNA
atggttcaggtggatctcatcaccggctttttgggcgcaggcaagaccacctttctgcgccgctatgtgcggtaccttgtacagcaggggcataaggtgtgcattctggaaaacgactttggcgcggtgaacgtggacgccatgctggtgcaggaggtgctgggtcccggctgcgatgtggagaccatcagcggcggctgcgactgcgacacccaccagcgccggatgcgcaccaaactcatcgccatggccatgcgcggctttgaccgggtggtggtggagcccagcggcatctttgatgtggacgagtttttcgatatcctgcgggacgacccgctggaccggtggtatcagctgggcagcgtcatcgccatcgtggacgcccttctgccggaaacgctttcgccgcaggcagagtatctgctggcgtccgagaccatgaacgcaggctgtgtgctgctgagccgtgcccagctggcagcgcccgcccagtgcgccgccgccgctgcccacctggagcgtgcactggaaaccgcaaaatcttcccgccgctttgcgccgggggagatccttgccaaggactgggacgccctgaccgatgccgaccttgccgcccttgccgcctgcggctaccggcaggccagctgcgaaaagctgcattttgaccagcacgcggcctttacctccctttgctttctggaactgcacctcaccccacagcagctgcagaccgccgcacagcggctgttcgcagcgcccgagtgcgggcaggtgctgcgggtcaagggctttgcgcccgccccggcaggcggctggctggagctgaacgccaccgccgccggctgcacccttgcgcccatcccgcaggggcaggaggtagtcatcgtcatcggtgaagcactggataaagccgccattgaagcaaaattgaaggggtgaaaggcagttttcccccataacaaaacgcattgtggaaaaacaggagggcacatcatgcaggaagtacgcgcagccgttattggcaccggggtcatggggcgcaagtatgcccagatgatcgcagagggaaaggcgggggcattgcgcctgaccgccgtggtctgccgcagtgccggggcgcagcagtgggcaaaggataccctgccggatacggtgcgggtgtgccccagcgccgaggcgctgtacgattatgcagaagagtttgacgccgtgctggtggtcaccccgcacaagacccacccggaactggtgatgcaggcttttgcccacggcaagcacgtcttgtgcgacaagcccagtgcaaacgcgctggcaccggcactggaaatgaaccgcgccgccgaaaaaagcggccttgttttcgccatgatgttccatcagcgccgctacaaaaagtatatgcggcttaaaaaattactggatgatggggcgctgggcgagatcaagcgggtgcagctggaaaacagccgctacttccgcacatggatgtaccaccgctccggcagctggcgttccagctgggcaggggagggcggcggcgcgctgctcaatcagggccagcatattctggacatctggcagtggctgttcgggatgccgaccagtatttatgccgtgattccctacggaaagtataacgattttatggtggacgacgaagccaccctgctcatggagtacccgcagcagcgcacggcaacctttatcctttccaccggcgagggcagctacaccgagcggttggagatcgtgggcaccaagggcaccgccctgctggaaaaggacactctcaccctgcacacctacgcgccagacaccgagacctaccgccgtaccgcagactgcaccgagcgccagcagcttaccgagaccaccgttaccgagcagttcgccccgcaggcagagccttacccggagatgctggcaaactttgcggacgccatcctgcacggcacgcccctgaccgcccccggcgtggagggcgtgcgggcgctggaactgaccgatgcggcttacctgtccgcatggctgggggaaaagctcaccctgccgctggacgcagaccggtttgaacaggagctgcaaaagcatattcaggaggaacaggcaaatggctaaactgcggtttattgtagtaggctccggctggcggtcgctgttttactggcgcatcgcgcaggcgcttccggagcggttcgagctgtgcgccatgctttgccgcaccgaggaaaaggccgaaaaaatgcaccgggaatacggcgtgccggtaagcacctcggcggagcagtgcattgccctgcacccggatttcgtggtggtggcagtgaataaagcgtccatcgccgccgtcagcaccgaatggcttgcccggggctttgccgtgctgtgcgagaccccggcggcgctggcggaggacgcattgcgcgccctctggcagctgcaccggcagggcgcaaagctgcaggttgcagaacagtactggctgtaccccacgctggcaaaacggctggcagcagtgcgcagcggcgcactgggcacgccgcagtttgcccggctgtcggtggcgcacggctaccacgcggtcagtctggcgcggcagttcctgaacgccgggcagcagccggtgcgggtgaccggacgcagctggacggaaaggatcatcgaaacggattcccgctggggtgcggtgcataacggcgcactggtggaaaagaccttgcagcagcacacgctggaatttgcgggcggcggcacagcgtttctggattttaacggtgtgcagtaccactcttacctgcgcagcacccacaccagtgtgcagggagagcggggcgaagtgttcgacgacaccctgcgctgtctggatgccgccggggagccggtgtgccgtcaactgaccccgctgcccgacccgctggcagctgccgccgcgcaggcagggctgaacgaggacgagaccgccatcgcctgttttctggacaggatgcagggctatcttgccggcggggcagaggtgtatccgctggcagacgccttgcaggacgcctaccttgccctgctgatggagcgcgcccttgccgccggtcagccgctggaaagcactccgcagccgtggaatacagaagaacgataaaaaaggctcaggagcacctgtcggcgcttctgagcctcttgatttataatgattggatcacatcaggtcgatcagtgcttccacctcgtccatgcgggtggcccagctggtggcgatgcgcaccacggtgtgggtgtcgtcgaacttttcccagaagccgaactttgccttgccttccagcgcagccagctgggtgttttccagcacaaggaagatctggttggtgggggagtccataaagaagcgatagccctttgccgcaaacccggccttcaggcggttggcggtgtcaatagcgtttttgctgatggagaaatacaggccatcggtgaacagcacgtcaaactggatgcccagcagccgcccctttgccagcagtgcgccctgctgcttgaccatggtcataaaatgcgccggtgcgccgtgggggaacaccacagcctcgccgcacagcgcacccaccttggtgccgccgatgtagaacacatcggtcagccgggcaaggtcggccagcgtcacgtccgtgccctcggcagccagaccgtagcccagccgtgcaccatcgaggaacagcggcatcttgtactcctgacacacagcgtgcagggcttccagctccgccttggtgtacagggtgccgtactcggtggggtgggagatgtataccatgccggggaacaccatgtggtcgtggttgtcgtcggcgtagaaggtggccaccagtgcccgcagctcggcagcgtccagcttgccgttgtgctggggcagggtgatgaccttgtggccggtgtactcgatggcacctgcctcgtgcccggctacatgaccggtggcagcagccactacgccctgccaccgctgcagcatggacgcgatgacgatggcgttgctctgggtgccgccggagatgaactgcacatcggcctccgggcaggcgcaggcggcgcggatcttctcgcgggcgctggcgcagtaggggtcggtgccgtagccggagaccttttcaaagttggtctcggtcagcttttgcagaatggcgggatgtgcaccctcgcagtagtcgttttcaaaatacagcatggcaaaacgctcctctatataattgtaagaaaacagtacctctattctacatcgccgcgaaaaccctgtcaaatccaaaaccgtgcacagcgcacgcaaggcaccgcaaaaacgcttacaggatacccggtgcgacaatatgttgaccggaactacggcctacgacagctttttttacgaaagtatgatcctttccaaaaagatgaaaagtttttcaaaaaagtgcttgacaattctgctgcatctggtataataactatcgttcccggcgccacggcgcaggaacacaacagaatatgcggatatggcggaattggcagacgcgttagattcaggttctaatcggggcaactcggtggaggttcaagtcctcttatccgcaccaaaccatgaaaatccgaaccttttctcgataggagaagggttcggattttttgttttcttcggaaagcaaaatgaaggctccttcccgacggctgtgtgtccgaaaccttatcagaaaaaagaccgtatcacaaaggtcacaactgtaaaggtgccgtaaggtagaaaggacacgagtatgaagtacgatgaaagaacctgcaaattcaacatggacaccggctgcgtggagctgctgctccgggatggaagaaaaatttccatcgactgcaccggggtcgaggatgcgttggatgtgaccatggcgcagaggtcggagttggattacctcatctacaatgatccgctgagctacgcggatttgattctgaatggtaacccggaggaatatttgaagaatgtggtcggaggtcatggatcagaggatttatcgtttagagattaactcgatataaggaacaagcccacaggtctgccgtatttttatgcggtctatcctgtgggcttgtttgctattatcgactcatgattgaatttgaaatttcaagcacgaccgtatcatgtttataggtggtaacaaccatcggcaggcctccagccttcaaaacttatgcagacgtttgattttcgtatcgtttaagccagaggaaaaagcagatgtttaataagatgcccactgcggtggaggtgggtgcggacagaccgatcatcgtcaggctggcgttgggctggatactcataatatacgccatggggagacgcaccagcagagtctgcaccagcccctgtaccatgacccagagggttttgtcgttgccattgaagtaacctaccatgctgaacaggatggcagtggcgatggtctcgggcgcaaagcccatgaggtaggcgtagctgttggcaataacagcggcatctgccgtaaacagaccggagagaacgtcacccttgcaccacaccagtgcaaatacggcgcaaccgaacactagaccgatgccaatgccggtgaacatggactgctcggcgcgttttttattgccagcacccacgttctgggacacaaaggatgccatggactgcatcagagaactggggatcagcatggcaaaattaacgatcttgcacgccacaccgtagccggaagatgcctccagccccaaccggttgacgaaagcgcagagcgccagaaaggaaagctgggtcaaaaactcctgcaaagccagcggcagaccgatgcccagaaattttttgcactgggggttcggcttgaaatcagagcgatggattttgaagggcagctccttcttcagcagcattgcgattgcacagattacgctgacggcttgtgctgctaccgtagcaatggcggcaccggcagcatccagatgaaaaccagccaccagcaccagatcgccaataacattcacaatgcacgccaccagcacaaagatcagcggagagcggctgtcgcccagaccgcggaaaagagccgagagcatattataggctacaataaagaagatgccgctgccgcaaatgcgcacatagctggcggtcaggtctagggcttcggcaggagcctgcatcagactggcaataaaccgtgcaaaaaacaccagcaccacgaacagtgcagctgccagaagggtgaacacaatagctgccccgccaatgacttgcccgatgtactgcggtcgtttttcgcccagatagcgggcaatgagcactgtgacgcccatggcaagctgggtgacaacaaaggtgacgagattgagtacctggctaccagtagaaaccgcagacaagcctgaagtggagccaaagcgccccactaccagaaggtctactgcgccgtaagcggcctgcagcaccagcgcacccagaatgggcagcatgaaaaaagcgagctttggcaaaatgcggccttgggtaaaatcggtcttatcgtttttcaagagaatctttcctttcgcgcataatagcatagaatttttccagcgtttggatggtgcacgctgcatcctcctcggaaatgctgtccagatacgggagcagttgcgagaagtagtccgtattgtacttctgggaaagcgcttgcccgctctcggtgagaaacagataggtcacgcggccatcttcagcggatacctgttttctcagataccctttgtgctccatctcttttacggtacgggtcacaccggggcggggcaggttcagtgtatcgctgagatcagagatcttcggctggatgccacgggtctgcaatttctgaataacatccagacactggatataagaggatgtcacaccctccggcagggcaggcagcatctcccgtgcccgctttgccagatagcaggcatccagcagctgcttgatcagttcgatggtcataatgaaattcctctccaaacgattatcgaaggtaattaacattgataattatatagaactgcccgggaatgtcaagtctttttgaaaaatcggagatgtcggcagctttgaggcatctgcttccggcataccattctagagggtgtttgagcgaatacagtctgaaccatggattagaagatcaaatacaaaacaaaaacagggtgcgtccctgaataggacgcaccctgccagcgtaattcacgatttgattcgttggcaacaaccgtgaattgcatatcgcaaacaggtcgttgagaattgctctgcttgtaaaacttgcgattaaagccacagataacagcgatatgtacaacagggcgttccccgtcgggaacgctctgcttttctttgctgggggcatgatgagcctgctccgcctgccataggcaagctcgcgtttgcgcagcaacaaaagcctcagtgaaatatcattcaagggtttccagtgcttccaccagtgcaaggatggtcagcgactggccgtatgccatgggagcaatcagaatgtttttgtagtggtcgcggtcgtagcccatacccgtaccgccggatactttcagcaccgtaccatcggtatcgatgttcttgaggattgcacggatagctttcttggcacagggcaggtaggaatcatccagaatccccatgcggatgcctttcaggatgccagcggtgatagcagcagagccggaagtttcttcgtagctggtggagtcatccagaaccgtatgccaaaggccgtcctcaccctgaaggtcacgcagtgcgcgcacctgtgctttgtaggtatccagaatgaacgtcttgacgccctgattcagcgtacccttaaacatatccagatagtccagaatacccagcgtgaaccagctgttgccgcggcaccagaacacgccgccaaagttgtccatccgattgaacgaccagccgtggaagaacagaccggtgtgggtatcgtacagatacttgatgtgcatcagcacctgcttaatggattcgtcgatccactcctgcttgccgtacttctggcccatccgattgaggaacaagacggtcatgaacagggtgtcgatccacatctcgctctcgtttaggcgaacgccctgacggtcgccgttggcactggtgacgtgctgaaagccaccctcacgggtacgcgggatgcactccatcagccactttgcccaatccagacaaagggcttcaaactcaggggcgtggtaaatctcattcaattcacacagagtcagcagcggagtagtcgtgttgatattgcgggaaggcagaccctgcgcaatgttctccttgaaccaatcatgcaggaaggtgcggtattcctccgaatcctgtatcttggcgattttgagcagaccgtacaggccgatgccctgcggccagtcccactccttgatgccgaagtcacggctaaaaaatccgatggcctcgccgccttctttcaaagtgtcctcgttttcgggggcaccaaggtgcatcagcttctggataacaagatccagctttttctgaatcagttcttttttgatttcgtttgccataagaaacacctcatgtatttgtattgtttttctcagcggttgaagtaagcgattttcgatattgtgcaggcgtaacgtgttgatatttcttgaacacacgtcccagataggtgatgctctcaaacccggtacggcttgcgatttcggaaacggaaagtgttgttgtttctaacaggctctgcgctttttttacccgcaggatgttgatgtattcgttgatgccgaagccagtcacttcatggaaggaacggctgagataatacttgctgatataaaactgctcggcaaggctgtccagcgagagcttttcctgaaagtaatcggaaatgtagtctgagatttggtagactgcatcgaactttccgccgctggccttaccctcctgcacatcgttcaggcaggcgacctgctgattgctgcgccggaagtagatgaagcctagaatcaactccgaaagaatagcggtctggctcataggctctgccttgtccagttcctccatgatttgcagaaacaatcggcgggtattcgctgtctgcttcggggtcagttcgtaaattccgtagtgcttgtggaagaacgcaccgatcttcagttccgggaacatcttatcgaccttttccacaatgtcccggtctacatagaggatcactcgctcgtattcggtttccgggtctcccacgatggaatgggacatatgaatctggccgctgtccacgagaatcaggttcccggcctgtgcttcataggcgcggttctcaaagaacatctgccgccgcccacggagcaggagataaatttcgtactcctgatggaagtggttgtaccgcatatcaaagtttgccggacgaaccatgtgttccaccataatgccgtttcgtttgcggtaatattgggtcgcatcaccctgaaccatgctgtgcagccatgttgttttcat

SEQ ID NO: 143 - DNA, 7280 bp, unidentified
  source 1..7280: mol_type = unassigned DNA
atgagtttcaatattcctaaaagtgacaaaaaaagggttatcattgtcggtggtggttttgggggtctgaaattggccaataaattgaaaaggtcaaattttcaggttgttttagtagacaagaataattatcatcaatttcctcctcttgtatatcaggtagcttcgtcgggaatggagccgagctctatttcatttccatttcgaaaaatttttcaaaaacgtaaagatttctattttcgtatggcagaggtcagagctatctttccagaaatgaatatgatacagacatctatcggtaaagctgaatatgattatctggtatttgctgcagggacaacaacgaatttctttggaaatgaacatatagaagatgaggctatgcctatgaaaactgtgtcagaagccatgggattgcggaatgctctactttcaaatatagaaaggtcaataacctgctctacagataaagaacggcaggagcttctcaatattgttattgttggaggtggggctacaggcgttgaaattgcaggagttttatcagaaatgaaacggtttgtactccctcatgattatcccgatatgccaagtagtctgatgcatatatatcttatagaagccggacctcgtttattgccgggtatgtcgacagaatcttcagaaaaagccgaacaattcttaagagaaatgggagtaaatatattactgaataagaaagttgtcgattataaagatcataaagtaattcttgaagatggctcagagattgcaactcggacatttatatgggttagtggtgttactgctattccagtgggtaatttgagtccggcactattgggacgcggtagaagaatcaaagttgatgaatttaatcgcgttgaagggatgaataatgtatttgcaattggagatcaatgtattcagacttctgataaagattatcctaatggacatcctcaattggctcaggttgcgattcaacaaggaaagttacttgctgaaaatttaaaacgcatcgaaaaaagtaaatccttaaaaccctttcactatcgaaatttaggatcaatggcaacggtaggacgaaatcgtgctgtagccgaattcagcaaaataaagatgcaaggttggtttgcatgggttatgtggttagttgtacatttacgctcgattcttggagtacgaaataaagtagtcgttcttttgaattggatatggaactatcttacttatgaccaatctttacgaatgatagtatatgcgaaaaaagcaaaagaagttagagaaagagaagctttagaagcaaagacacacttaggcaatgatattttacatccggataataaataaagattatgtgtgttattcgttaaaaaaaatatcagacaggaaaaatttcctgcctgatattttttatatcatttgaccaatgtaacacttaatggctgctgtattgccgcagcagcttgttctagataggaaaaccaggattctggagtatcaaatccgtatttactccatcctgctccccaataatatacgaaatctgaacctggagtatactcgctgatagcaagaagttgtccatctgctcctcctctttcatttgttttttctttttcactgtaaaataccggtttcgcatcgttcaaggcttgtggaaatacagctccgacatagattataccattgttattgtcaacattatccgttgggtctgcatatccgatataacccttatcagcagacgcaacatatcggcatacatctgctggttcatgaaggacaatacctgcaacaataggtgtattttctttcagattgctatatgacacagttgtcttatttaattgggtaccagcatccaaacttataatacgagtttcaacaatatcactctctccttttacggtcaaagggttatattctaatttcaccgtgaaacgtagtggcccgttatctaagatttcgaaagatttataacaataagggtaaagaatagaatcattgaccatcagagcagcagtaccacctcctaatgtaggacctaccttatagcaatccaatccattaccatgatctacatggtaagaaactgatttatataattcatcagcagctttaggatcagtcttttttagttcagcaatttttgctttggtttcaggattcaattctcctgcatatctatcttctacaacaagttcaggaacagattttacccaaatatcatatccaaaagcacgctctccggtagcttgaagagccggaccatatgtacgaaatgcaattttatcgttttcccaagctatatcatcaacacgttcaggatattgttttcctgtcgtcattgtcagaaactgctcaggagtacctggttttattacatattctgattttgtattggctttaacatttgctggaaaaatgattttttcatcataagtaatctggtaaggtacttgctgtccttgagcatctattataataaatgtagccgtatcattaagttgcaatttttctgcaacagaggacattgctacttctacaatttcattgctccggtcaaaagaagaatcattttgaatggctatttgtacctcttttttttcagtacacgaaaaaccaacaatggaaaataagcttaaaaaaagtatttttctcatttttgttatataattaaagaaaccctacatagtcttgtaacttaaaagttacaagacttgtaaggtttagatataaaatttagaatattatttaggttgtttcccgatatatgctaatataccaccatccacataaaggatatgaccgtttacaaagtctgatgcttcagaggcaaggaatactgccggtcccatcaaatcttcaggcgttccccaacgtgcagcaggagttttagcaacaataaatgcatcaaatggatgtcttgaaccatcagcttgtttttctcttaaaggagctgtttgtggtgttgcaatgtaacccggacctataccattacattgaatattgtattctccatattcagaggcaatattgcgagtaagcatcttcaatcctcctttagcagcagcataagctgaaacagtttcacgtccgagttcactcatcatagagcatatattgataattttaccatgacctttttttatcatactggggataactgctttagaaacaataaaaggaccatttaaatctatatctattacttggcggaaatctgcagcagacatttcatgcataggtatacgcttgataattcctgcattatttacaagaatatcaataactccaacttctttttcgatttgagcaaccattgcatcaacctggtcttctttagttacatcacatacataaccatgagccttaattccttcagcttcataagcagcaagacctttttctaccaattcaggtttgatgtcattgaaaacgatttttgcaccagcttgagcaaaagctgtagccaaagcaaaaccaattccataagaagcacctgttacaagtgcaaccttaccttctaatgaaaagtttaccataaaaataaagttagtgtgttttgttaattaattcgatttatcgcaattctgtatttttgtagaaatcttgatctccataatctagattttcaccacccataccccatataaaagtataattacgagttgctgcagctgagtgtattgaccattcaggagataatacagcttgttctccttgcatccatatatgacgagtctcagtaggttctcccataaagtggcatacagcttcaccttctggaacctcaaaatagaaatacgcttccatacgacggctatgagtatgtgctggcatcgtgttccatacactacctggttgtaattcggtcatacccatctgtaattggcaggtttccaatacctgagaaaccaacattttattgatattcctatgattagatccttctaatgagcccatttctgcaaccacagcatcagcttttgtcacttttttatcaggatatgtcttatgagcaggtgcagagttaaaatagaattttgcaggatttttcggatcaatgctttcaaatgtaacagtcctttcgcctgctccaagatataatgcttctttataattcaaatcaaatattgcatctccggcttttactctaccaggtcctccaacgttgaatatacctaattccctgcgagagaggaaatgtgttgcttttaaaggatctatggcttcaagtattaatgtttctcctactggcttggctccacctacaataagtctgtcatacatagaataaaccatgtttacttcattatcggtaaagattttttcgatcaaaaaatctccacgtaatcttgttgtatcataactctttgcatcacggggatcacatgcatagcgaagttcataatttgttttcataagtatctgttgttaaatatgtaaataactcaatttatataatatcgatatcacattttatatatgtaagtacgtgaaaatgtgattgcgtaatcgattgcacaaatgtataaaaaaaatattattctacaattttttttctttactttttttcttatctctcattttcaaggaagactcccttttcaccaaatccggttgtaataaaatacattctctgtgctccatttcgctttcatggttcattttttttaataaaagttctgctacatttttacccatttcccggtttttttggtctactgaagtcaaaggaggatcaacaaacgaatcaaaaggttcattggcaaagccaacgacagatatatcttgaggaatacgtaatccaccgttacgcagtgtatgcataacccctattgcagaataatctccggcagagaaaattccatcagggcgatttttcatatttaatattttgagtccagcctcctctcctgttactaatgtaatgctgttttcaagaattagctcatcttctacaggtatttttgcgtcttcaagggcctttatataaccttctttgcgttttcggtatacactaagagtcataggtcctgccaaatgagcaatacgacggcatccttgtgatattaaatgctgtacagcatcataggaagcttggaaattatcaacttctaccatgctactaataggttctaaaggaactcggtcgaaaaagacaacaggaataccggcagaaattgctgtttcaaaatgtttataatcaatggtttctgatgccaaagaaacggctaatccatctattttttttgacatcatggttttaacaattgctttttcatcatcatatcgttcgtttgattgagatacaagtacactatacccgttttcatgagctatactttctataccaccgataacagaagcaaagaaatgacgatcgatacgtggaacaattactccaatgacaaagccttttcctgttcgtaaatgatgagctactgggtctggatgataattcattttttttgctaattccaaaaccgcagctttcatttttgcactaattctcggatgattttgtaaagctctcgatacggtagaggctgaagtgtttaattctttagccaaatcattgatagtaactttatgtattccagacatcttctttatcttttagtaaattttgtggcgacccatttatttttctctatataattttcaaatttcaggtcgcatttctctgcttcttctttaattacaggaatatcatctacatagaacccactgaaatatatttctgacccagggtgcatacatcgcgcatagacgtgcatatcatttaataaaatattacgattgatattggcatatataatatcatatgtttcgtttcctaataattctactccacctaattttacagaaatatctgaaacattatttaatgcaatattctctactgcgttttcgtaagcaaaggggtctatatctatagctgttattttgtcagctccccgttttgccgctaaaatcgctaaaacagctgtaccacatcccatatctaatacttttttccctgaaacatcccctttcaatatacttttaagtatcagacttgttgtttcatgatgacctgttccaaatgccattttgggatcaataataatggaatattttacttgtggtatattcttgtgatgtgtactgtatatgacacattcattatctataacaataggctggaaatagttcttttcccattcctcattccaatttttccctttgatcgattctattacataacttatggttgcattgaatggaaagttttcgataacagactctaacttttctttattgaataaggatgtttgaatataagcatctaatcctgtcgctgtctgaacaaaactctcaaatcctatgtccgcaagtaatgctgataaaatatccgatacagtttcggaatatggtgtaatttggacttttacattaatataatcattcattcttccttgttttactatatcttatttttgtattatccgttgtcctgcatatatttttgaaaaaaattttcaacttttcatttttttcatcaatctgggatatacaatattttttacgtgcccataattgggttgtaattgcaagactttttggtacatctttttggcttcagtataattttcatttttttcttcgacaagacctatagttgtaagtaactgtatgtacatccaattattctttatatatccatcatgactttccatatatttcaaggctttttggtagcctgctaatgccttgtctttatctcctccaaacatagatggcatatagaaaaggatattggaatacaagatatttacataaggattatcagggttcagagatattgatttttttgccttggacatcatacctttagccaatgttgctgcttttatcggagagagagctatttggtatccaataaggtttgccatcagtcctaataataaagcatcattcggtgtttgtttgtacatttggtttgccaaagccaaagcatttgccaatactctttccgcatcgtcttttctttttttatccaacaaatgtcccacaagaccgtaatagtaagtcagtgtttcgagttgacaatcatggttctgccactctggatccttcgaaattttattaatcaagatttcccactggggcattttaccattgatatacatattaaatgctgttgctttgtagtcaatattagcagcttgaattaaagatatggataaaaataataatattactaaaattgatgttatttttttcat

SEQ ID NO: 144 - DNA, 13032 bp, unidentified
  source 1..13032: mol_type = unassigned DNA
atgactttaaaaaagaacgatattgtaaaccttacaataacttcggcaactgccgagggcagcggagtcggaagaacagatgacggcattgccgtttttgtacagggttctgcaatcggtgacgaactcaaggtgcgtatattaaaggttaagaaaacctacgctttcggcaaaatcgaagaaattctcgttccgtccaaggcgagaattactcccgactgcgaaaactttatgaagtgcggcggttgcacatggcgacatatttcttatgaagaagaatgcaaaataaaacagcaaagagttgaggatgccgtaacacgcatcggcggtcttgataatgttgttttcaagccgattatttcgtcggataatatcacaagataccgcaacaaggcgcagtatcctgtcggtcttgaccgtgacggaaatgttgtgacgggtttttattcattccacagccaccgcataatcaattgcaccgactgtattttacagcccgaaatttttgcaagggtaattgaaattacaaaagattttatcgcaaaaactaacacggaaatttatgatgaaacaacaggcaagggcagacttcgccacatttatatcagaatcggcgaggtttcgggcgagcttatggtgtgctatgttgtcaacgcaaacggtcttaaacaggaagatttactcgtgaaaatgctcaaatccgaacttccgcagttaaaaagtgtgattattaattcaaacagagaaaaaaccaatgttgttctcggcagaaaaaacagaacaatctacggaagtgaccatattaccgacacactttgcggattgcagtttaaaatttcaccgttttcgttctggcagatcaacagaaaacaggctgaaaagctttacggcaaagccaaagaatatgcaaatcttaaatctgacgaaattctgcttgatttatactgcggaacgggtacaataggtcttacaatggctgattcctgtaaacagcttatcggtgcggagattgttgaagatgccgtgaaagatgcaaatgaaaatgcaaaagcaaacggcattgaaaatgcacgattcatctgcggagatgcctcagatgccgcatttcagcttgaaaaagagggtttaaaacccgactgcgtaatccttgacccaccgagaaaaggttgcggtgaagagcttgtaaagacaatttcaagaatgtcgccgagccgtgtagtctatgtatcctgtgaccccgcaaccctcgcaagagatttaaaattcttcacagaaaacggctacacccccaaagaaatcaccccctgcgatatgttctccggaacctcccatgtagagagcgtggctctgttgactaaagtacaggagtaaaagtgtgaaaattattaaatttgaagaaatctatcgtgatgatatgatttttacggttttacaggcaaaagatgctttgggtagaaaacctactataaatcctgaccttcttgatattaaggcaaactatcttgattgcaatgatatgttttggcttgcaatagatgaaaatgacagggtagtcggatgtattggatgttcaagaattactgatacagatcaggcatttttgcataggttttatataaaaccgtcattaaaacgaaagggaatcggcgcaaagttacttaatacggcagagttatggatgcgtgaaaacggtattgctgtttcaaaagtacatttggggacaccaaaagagcagtggtttgaatcttatgctttttatccgaaacacggatatatagaatatgaaccaaggtatatgatgaaggttctgtaattaatgaaagtcaaaagtaacatatttattatgattattgagtagtgcaacaaataaaatgaaatatgtttggggtttggggtacgatattgaattgacttatttaaaaagaaaaagtgacaccgatggtgacgctttttgatggaggtgcacaaaatggcaaagaagaaaaatgaaataagtattcgctcaagtgctgcggaatatctcacatatgttgcttctgtgggaaatcaggcagatagctttgaaatgcgttatgaggacgaaaatatatggctcacacagaaaatgatggcaacgctgtatgatgtttctgtgcctgcaatcaatcaacatctaaaaaaaatctttgaagatggcgaattagtcgaggattcagttattaagaaatacttaacaactgccgacgacgggaagaattatcaaacaaaacattataatcttcaggcaattattgcagttggatttaaagttaataatgaacgagcagttcgattccgtaaatgggcaggtcaaattgtaaaagattataccattcagggctggacaatggatgtagaccgtctgaagaagggcacgatgttcacagatgaatattttgaccgtcagttagaatacattcgtgaaattcgcctgtctgagcgaaaattctaccaaaaggttacagacctttatgcaacagctttcgactatgataaagatgcaaaaaccacaagactctttttcaaaactgtgcagaacaaaatgcactatgctacgcacagacatactgctgcggaactgattgttgaacgagcggatgcggaaaaggaacatatgggactaacctcttgggaaaatgctcctgatggtaaaatagtgaaaagcgatgtatctgtagcaaaaaactatcttactgaaaaagaattgtcttttttggaacgcattgtatcgctgtatctcgattatgcagagttacaagccgaacgtcatattcctatgagtatggaggattgggcgaaaagacttgacggtttcctcgaatttaacggtactgaaattctcacaggagcaggaaagataagtgcagagcaggcaaaacttcacgcagaaacggaatttgaaaaatatcgtgtaattcaggacagattgtttatgtctgactatgacagatatttacttgaactggaagaaaagatgaaagaagagtaaatggaaattttaatgttttgcgagaaattataaaagcatctcattgcatgagtctgtttattgagatatgattggcttggaggtgatacattatggcaaatgaagataaaaaggattttaatgctatgcttatggatagcaaggatatgcctaaatttcaaataatcacagatgaaaagagtattaaaaaatatggtggagataaaatgtattttgcaccgccaatcgactatgacaaagtaatgaaaaaaattccatatggtaaagtgattactgtcggaaaaatacgagaatactttgcagagttaagcagtgccgattttacagagcctatcacagccggaatttttgtttcaatagttgcatgggcgagttatcagcgcacagaggataaaaccccttattggagaacattaaaagcaaatggagaattaaatgcaaagtatcccggaggaattgaggcacaaaagaaaatgcttgaaactgagggacatactgtagtgcaaaaaggaaaaactaatatcaagtattatgttaaggattatgaaaaagcattatttacattgaaatagataatgcgaaaacttcagtttcacggacatatccccacaaacggcagaaccacgaaaaaggctgtggatgtattcccttgaaccaaaaatcagccaagaaattcattgtattcagatgagccatgttgaaagtgtggcattgattgaaagaaattaacaaaataatatagaaaaggacttaaaatgcaaaatacacttaaaataaaacgaacaaaaacagctttggcatttaatcttgcgattatcgcttgtgagattgccgcaataattatcgtgtttttcaaaataggctgctatccgcttgtatattacactgaggacagcaacctgtttgcacttgttgcctgtgcggttatggcaggctttcaggtgcgatatctcaaaagcggaaaagaaattccgcactcggttcagatgttcaaatatatggcggcggctgtgctttcggtaacatttatcgtagttcttgctgtactttccccgatgcgtggagagggcataaacggttggctctatatgctttttaacaaagacttcacctttttacatactttgtgtccgattcttacaattttatcgtttgtgctttttgaaaaagaacctcaccttaacacaaaatcagctttcacggctacaatccctacattattatatgcgattgtgcttattatacttaatatagttggtgcagttgacggcccatatgcgtttttgcgtgtgatgaatcaaccgttgtatatgtcatttgtttggttcatcgttatagtaggcggtgcgtttttccttgcacttctgcttcaaaaacttaattcgataggaagaaaaagaaaataatagataataagacagtaaacagatgaaaatttcagattggagtgatttttatgaaataccgcaagttggtggagaatgctaaaaagccaaacggcttttggggcaaaatgatgattaaggctatgaataaaggacattcaagccttacctcatggggacttgaacatatgaatatcgaacgcaccgcaactgtacttgacataggctgcggcggcggaaaaaccgttgaccgactttgctcaattgttgccaacggcaaggtttacggaatcgattattccgaactctcagtaaaatcctccgaaaaactcaattcaaaaaatatactctgcaacaaagcgaaaattcttcaggcatcagtatccgatatgccttttgataacaatacattcgataatatcacggcagttgaaacttactacttctggcctgataaggaaaatgatgtaaaagaagttttccgtgttctcaaacagggcggaacggttatgctgctttttgaaatgctcagaacagacgatgatccgttcaagtgggaaaaggttgaaaatatgctgaatatcaagtcggtaactccgcaggaaatcagagccgtacttgaatctgcaggctttgaaaacataaacacatacactaaggaaggtacaacatggctttgtgccacagcacaaaaaccgaagggtgatgaaaactaatgaaggctttgattacaggcgcaagttcgggcataggtaaagaaatcgccagatatcttgcagaactcggttatgaccttattcttgtatcacgctcaaccgataagcttaacaagctgaaagaggaactttcaaatgtgaatgtcagggtaattacgcttgatttttcacgagaaagtgacagtatggatttgtatgagcatattaagaatgaaaatgaacagattgattttcttgtcaacaacgcaggctttggagcatacggaaaatttttggatgttccgcttgaaagagagcttgaactcattcacacaaatgtttcaacggttcacattctcacaaagctttttcttaaagatatggcggagagaaacagcggatatattctcaatgtaggttctgccgcaggatttcttgcaggaccgacatttgcaagctactatgcgtcaaagaattatgttgtccgtcttactcaggcgattcatgaggaaatgcgtagggataataaaaatgtcaaggtttccgtactttgcccgggtccagtaaaaaccaacttcaataatgttgcggatgtaaaattctgcataagaggacttgacccgaagtttgttgcaaggtatgccgttgacatgaccatgaagggcaaaatgattattacacccggctttgaaatgaaagcggtgtcgtttttcagacattttgcacccgaaaaacttctcacaagaatttcttataatgtgcagatgaagaaaaacggtataaaataattgtcatatagaaataggggaggtgacacattgaggataaaattcgttgacaaggcgataaaactttacaaaagaataacaggcagatttgaaccgataacaagcaaatgcgttcacgataatatttttgcaattgccggacaatcggcattctttattatattatcggctgtgccgctctcaatgttctttgtgtcacttttgcaaaacctgcaaattccgattgattttgtttatcacggactcagcagtgtgttttcgtcaaaaattgccgatgacttaacatactttctaacctctgcctatgaaagtgctgtgggaatttctcttgtaacgcttgtagtcactctgtggtcggcggcacagggaatccacgcaatcacaaacggtcttaacagaatttatgacgcttacgaaaacagaaactggttctttttaagaataagggcgatgttctacacaattgcattgtttgtaattgtgcttgcgtcacttgtacttattgtcctcggttcaacaattaacgatttcctttcaccgcatttaaaatcgttgccggacataatcggaataatctatcatctcagatatatacttatctttttgtttctgacggtattgtttgccctgatttacaggaactttccgaacatctcacgcagcgagcataaggaatacggctttaagtcacagttgcccggtgcgtttctctgcacggtttcgtggtatgtgctttcgttcggtatttcggtttatgtgtcggatttcaacggattttccgtgtacggaggtcttaccagaattgccgttattatgatctggttttactttcttatggtttgtcttatggtttgtgcggaaatcaattatgtctatcatgacaggataaaagtgtttaccgttgcaaaatttaaaagaaaggtaaaaaccaaaggttcagagcttaatcaaataagaaaagaaagaaaaaataataagtcaaataaaagtaaataaatcaaaataaaacacttccgttcggtgatactaccaatggaggtgttttttatgaaaagaaaattttctaaaaaggtgatttcaatattgctcgtatttgcaatgctcatcggcggagcgtgcttttcatgcacaagtgcagcggcgtttgaccttggctatatcagcgaggacggaatgaagctcggttacagtataatcaagggctattcaaaaatgtcgatgaaaaaaggtcagtacaaggacgggaaaattgccgtttactgcggacttgatgtgaataatctatatgttatgggttcgctcggttggttctatatgacaaacggtgttgatctcgaccgtgcaatgacggataacgattacgcaatggagatgattgcaaagcttgattcgcatcttcaaggtgcaggcataacaaatgacagggcaaaagaaaagaaagccgagattttaaaggatgcaaagtatgtttatcaatgctttgacacattgggactttacattgttgatgttgacaaaaacagagccgatgaactcatgaacgacagcggtattgattttgtgcttgacggcggttgcgttcccaaaaatatgaaagacctcaacattgacggaaaaacagatgaaaaggacgctgagcttattcagaagtatcttatcaaagacctgacctttgacgattatgacgaaaatcagtatgctatttttgtttgcgatatcaacggtgataaaacccccgatatccgtgatgcgacagaaatcctaaaaaagtgacaattgtcataatttgtgcaaagtgaatatgattttaactgcgacagctgtaattttagctgtcgcttttgatttgtgacagcaatgtgaaactttgaataattatttgtaatttctcttgacattcaaaatgaaggtgctataattactgatacaaattgttttgtatcgaactattctatatagaacaatatctcataagtgtgatttcggaggtgaaataatgtgtgatgacaaaagcgtaaaaagctgtaagtgcaacaaacgctttaatgattcaatcggtcacgaaatcaaggtgcttaatcaggttttgcagagaaagttaatctattccgccaaggataagggtgtggataagctgactcttatgcacggctggattattgcatatctctatgatcatcgtgatgaagatgtttatcaaaaagatattgaaaacgcattttcaattgcccgttcaaccgttacaagtattcttaaacttatggaaaagaaaaattacataacgagggagagcgttgaaagtgatgcaaggctcaaaaaacttgtcttgaccgaaacaggtattgaacttcattacaaaatcgaaaatatgataaccaaaaacgaaactttgcttgacagtctgctgacaaaagaagaaaagaaacaatttctttttcttataaataaaattctcagcggacttgaaaatgcaaattaaaacggaaggagataagtatgataaaaactttggcaaaaaatatcaaaggtttcgtcaaagaatccgttctgactccgttctttatgatactcgaagtaattgttgaaacaattattccgtttcttatgtcatcaatgattgacgacggtatcaacaagggcgatatgcagcacatattcataacgggcggttatatgggtgcacttgcactcacgggcttgtttgcaggtatgatgggcggtatctacggtgcaaaagcttcggcaggctttgcaagaaacctcagacgctcaatgtttgcaaatatccagtcattctcgtttgccaacattgaccgttactcaaccgcaggacttgttacacgtatgacaacggatgtaacaaatcttcagaatgcatatcagatgcttttaagaatgtgtttcagagcgcctgtatcgctcatctgtgcaatggcaatgacattcatcatcaatgcaaggcttgcctgtatttatctcattgcaacaattttactttctgttgttcttgcctttattatgaaggcaacatacaagtatttcagtcaggtttttgaaaagtacgatgaactcaacgcaagcgttcaggaaaatgtaacttcaatcagagttgtaaaggctttcgttcgtgaaaaacacgaagttggcaagttccgcaaggcagccgacaatgtttacagactctttgttaaggctgaaaatgcaatggtaacagtatcaccgattatgatggttacttcatacgcatcaatcattcttgtaagctggttcggcgcaaatatgatcgtaagcagtgagcttacaactggtgaacttacaagtatgctcacattttgtatgaacattcttatgaatcttcttatggtggcaatggtgtttgtaatgctcacaatgagccttgcaagcggtaagcgtgttgcaggtgtgcttaatgaaaaatcaacgcttgcaaatcccgaaaaccctgtttacgaggttaaggacggaagcattgagtttgacaatgtttcattctcatacaacacaaaagccgaaaaaccgattctcaacgatatcaacctaaaaatcaaatcaggcgaaacaatcggtattatcggcggtacgggttcttcaaaaacaagccttgtaaaccttattgcaagactttatgatgtaaccgaaggttctgttaaggtcggtggaaaagatgttcgtgactatgatatcgaaactctgcgtgataaggtttcggttgtgctccagtcgaatgttcttttcagcggtacaatccttgacaacctcagatggggcaacgaaaatgctacagaggaagaatgcgtcaatgcctgcaagctggcgtgtgcagatgcgtttatcgaaagcttccctgataagtacaacacaaaaatcgaacagggcggtactaatgtttcgggcggtcagaaacagcgtctttgcattgcaagagctttgctgaaaaatccgaaaatccttattcttgatgattcgacaagtgcagttgataccgcaacagacgcaagcatccgcaaggcattcagcgagaatatccccgatactacaaagctgattatttcacagcgtgtatcaagcgtttcacacgcagacaagattattgtaatggatgacggtgagataagcgcagtgggtactcacgaagaacttatcaaaaacagtccgatttacaatgaaatttatgttgcccagacaagcggcaacggtgattttgatgcgaaaggagagctgtaattatgccgggaccaatgggaagaagaaaccgaggacctgcacaaaaggttgaaaattcaggtcaggttcttaaaagactattcggtattatcttcaaaaaatataaatttcagatgattattgttttcgtatgcatcctcatcagcgtacttgcaaatgttcagggttcattgtttattcagaatcttattgacgattacatcactccgatgattcagagcggcagccgtgacttcggaccgatgctcggagcaattttaagagttgcaattttctatgcgatcggtgcagcgtcggcgtttatctacgccaaaattatggtttatgtaacacagggtacaatgcgtgatttgcgttgtcagatatttgaacatatggaaagccttccgataaaatactttgacacacaccctcacggcgatatcatgagtgtttacacaaacgatattgacaccctccgtcagatgatcagccagagtattcctcagcttttcaacagcggaattacaatcatagccgttcttgtcagtatgtttacactcagtattcctcttacaattcttacacttgtaatggttggtgtaatgctttttgtaacaaaacagcttgcgtcacgaagcggaaggttttttgcaaaacagcaggcagacctcggtgcgactaacggttacattgaggaaatgatgaacggtcagaaggttgtaaaagtatttaaccatgagaaaaagagcattgaagaattcaatgagcttaatgacaggcttttcaacagttcatacaacgcaaacaagtttgcaaatatccttatgccgattaacgcacaaatcggtaacatcagctatgtactttgtgcaatcgtaggttgtatctttgctctcaacaacttcctcggatttacaatcggtaaactcgtaagcttcctcacattcaacaagagctttacccagcctatcaatcaggtcagccagcagtttaactcaattgttatggcgcttgcaggtgcagaccgtatctttaaacttcttgacgaagagcctgaggttgatgacggatatgtaacacttgttaatgtacgcaaagagggcgacaggcttgttgaaactgaggaaaaaacaggtatgtgggcttggaagcatactcacagcataacaggcgaaacagagtatcgtgaactcaagggtgcgcttgttatggacgatgttgacttcggttatacagatgataaaatcgttcttcacaatattgatttgtacgcagaacccggtcagaagattgcgtttgtcggttcaacaggtgcaggcaaaacaacaatcacaaaccttattaaccgattctatgatattcaggacggtaaaatccgttatgacggaatcaatatcaacaaaatcaaaaaaggcgaccttcgccgttcactcggtatagttttacaggatacacacctgttcacggataccgtaatggaaaatatccgttacggcagacttgacgcaacagacgaagaggttatcgcagcggcaaagcttgccaacgcagacagctttatcagaaaacttcctgacggctacaacaccctgctcaaaggtgacggcggcaatctcagtcagggacagcgccagatgcttgcgattgcaagagccgctgttgcagatccgcccgcacttatccttgatgaggctacaagttcaattgatacccgtaccgaaaagatggttcaggacagcatggataagcttatgcacggcagaacaacctttgttattgcccacagactttctacaatcaagaattcagactgtattatggttcttgaaaagggcagaatcatcgagcgtggttcacacgaacggcttcttgaacaaaagggcagatactatcagctttatacaggcaaaaccgcataatgataatcgaaaggggagagttgcaaaggctcccctttttctgttcttgaaatattgacttgtttattgtacaataatattcggaattgtgaggtgttaaaaatcaaagctaattcaaagctaatattaaaacttactgcattgctaacagtaatttgtcttgcactttgttcgtgttcaatcaatatcaatgtgaacggttccgattcggaaagcaaaacaactgtttcagaaatcggaacattatcggttcattaccttgatgtcggacagggtgacagcatatttattgaactgccgaatcaaaagtgtatgctgattgatgcaggcgaaaatatgtacggcaaaagtattaccgaatatatcaataatctcggatacacaaatattgattatctcgttgcaacccaccctcatgccgaccatatcggttcaatggcttatgttgtaaagcataataatatcggcgaaatctatatgcctaaggttacaaccacaaccaagacctatgagaatctgctcacggcaattgcagacaagggacttaaagtcaagtcagccaaagcgggtatgaatattattgatggcaacgatttcagcataaatattcttgctcccgtaacaattgacgatgataatctgaacaattgctcgataattctaaaaataacttataaaagcgacagctttctgttcctcggagatgccgaaaagaaagagcttgaaaccgttacggcagatatgagtgcagaagttcttaaagtaggtcatcacggaagcagaacttcaacaacaaaagcgttgcttgaaaaggtaaatccaaaatatgcggttatttcactcggcaaggataacagctacggacatccgcacaaaagcacattaaagttgcttgatgaattcggagttgaaacatacagaaccgatgaaaacggaacagttgtcatttcaaccgagggttcaggtgtgacaatcaaaacgggacaaacttcaatgaaaagggatgaataa

SEQ ID NO: 145 - DNA, 11307 bp, unidentified
  source 1..11307: mol_type = unassigned DNA
  misc_difference 5318: note = a, c, g, or t
  misc_difference 5319: note = a, c, g, or t
  misc_difference 5320: note = a, c, g, or t
  misc_difference 5321: note = a, c, g, or t
  misc_difference 5322: note = a, c, g, or t
  misc_difference 5323: note = a, c, g, or t
  misc_difference 5324: note = a, c, g, or t
  misc_difference 5325: note = a, c, g, or t
  misc_difference 5326: note = a, c, g, or t
  misc_difference 5327: note = a, c, g, or t
atgaaagaaaataagataaaaaaagcaaacacatccccggaagggcaggctggttctgagaacatgagtacagcagatgtagatgcagtaatgaagaaatacgaccgcgaatccaatattcgtgtgtggaccggcaaatataagctggctgtacgcggcctgctggttgccttttctctgtggtgtatctatgttaccttatttgcaaccttcctggaggaaatccgactgacttcttttctggggctgatcattcttatcggatttcttacctatccggcgaaaaaaggagatatcagagaaaactacatgccgattggtgatattatttttatgatcgcaggcgcaggtgcttttctgtattttactttttctgcaaatcagatcatcaatcagggtaccagatttgccccttatcagattgtgatcggtattatcggtattgctgcactgatcgagcttaccagacgatgcgtgggcctgccgatcctgtttgtggcaggttttttcctgatctatgcactggctgtagggcttaccaatccggcatttttgggaagagtgaaattcctggtgcggaatcttttctacacaaaagagggtattttctccacacctgtaaatgtatgctctaaatatattgtggtatttattattttcggtgcgtttctggagagaacaggaatctccaacttctttattcagctggctaactgtattgcaggaaaatatgcaggtggaccggcaaaggtagcggttatcagttctgcactctgtggaatggtatccggttcctctgtaggtaacacagtaacaaccggttctgttacaatcccgatgatgaaggacacaggctacaaaccggaatttgccggagcagtagaagctgcttcttccacaggtggacagatcatgcctccgatcatgggagctgccgcattccttatggcagattttgtgggtgtaccgtactccaacattattgtcagggcgattctgccggcattgttgtactttacaggaatctttatttctgtacatctggaagcaaagaaattagggctttccggaattccgaaggaaaaacttccggtatttaagcttctgatccgtaaaatctatctgttattacctctggtcatgctggtaatctgggtgtccggaaactatatgaccatgcagaaggctgccagctatgcaatcgttctttctgttatcgtaagtctttttgacaaagaaaacagaatcagtgttaccaaatgtattgatgcgctggaagcaggaggaagaggtgttatctccgtagcagtagcctgcggtgttgcaggaatcatttccggttccatcaccatgacaggacttgccaatgacctgatcaacggaatcatcagtgttgcaaacggaaaactgatcattgcactgcttctgactatgctgtgctgtatcgtacttggtatgggtgtacctaccactgccaattactgtatcatggcagcaacctgtgctccaatcctggtacgtatgggagtacctacactggcagctcatttctttgtattttactttggtattgttgcagatatcacaccgccggtagcgctggctgcctacgcaggttcagccatagcgaaggccaatccgatgaagactgcatttacagcctccaggctggctatcgcagtatttatcgtaccttatgtattctgcttcaatccggcaatgctgctgatcgataccacaccgcttaaggttgttcagatctttatcacctcactgatcggtgtgtttggattgtcctcctcactggaaggcttcctgtcagtgaaaatgtctgtaccggttcgtgtcttaatggcagcaggcggactgatgctgatcgatccgtcactgatgactgatgttgtgggaatacttctgatcgtgggatgctgcgtatggcagacagcgcagaagaagaaaactgcatagagaagaataaaaaaaccggcaaaacacctgtcatttgggtgtcctgccggatttttttatttagaaatccagttctttcagataccgtccaagtgcatcctgccaggtggggagtggtgtgaaaccattggctgtcagtttgctcttatccaggcggctgttaaacggtctggctgctttggaagcgccatactctgcagttgtgacggagttgactgtcatgttttccgggagatattccgggtgtcccatggcagcggcctgacggaagatttcttttgtgaaatcataccagctgatatatccgccctcattggttgcatgataataaccgtatttttcagtttcgatcatatctaccagaagtcttgccaggtcataggtataagtaggtgtaccgatctggtcattgactacggagagagtatcatgagtttttccgaggttgatcatggttttgataaagttcttgccgtttttgccgaatacccatgcaatacggacgataaagaacttatcaactgtgccggatacggcaagttcaccgtccagctttgtctgtccatagacatttaatggtttatagtccttgcagtcaggctcccatggagtggttccctggccatcgaatacataatcagtggacagatacagcatcttgatgtcaagctctttgcacacatcagcaatattctgagttccggttacatttaccagacgaaccttcggctggttctcttcatcttcggcagcatctacagctgtccatgcagcacagtggatcacagcatcaacatttgcttctttaatgactttttctacagaagctttgtcagtgatatccatctgaacataaggcattgtggtaactgcagtgccatcagcgattccgctgtaggaaggagcaatgtcgcttcccacaccttcatagccgcgtttcgcaagttcgttcataacatcatgtccaagctgaccgcctacacctgttacaaaaattctcataaattatgcctccccgcggtttgcgtacattttttcatagtagttctggtattcaccggagatgatcgtttcccaccattctttgttatccagataccatttgatggtcttcttgataccgtctgcgaattttgtttccggtaaccagccaagttcgttgtgaatcttagtcgggtcgattgcataacgcatgtcatgacctttacggtctgctacgtaggtgatcaggctttctggtttgccaagttctttgcagatgatcttaacgatatcaatgtttgtcatttcattgtgtccgccgacgttgtaaacttctccaacacgtcctttgtggatgatcaggtcgattgcgcggcaatgatcttctacatagagccagtcacgaacgttttcgcctgttccgtataccggaagtggtttgtcatttaatgcattggcgatcattaacggaatcagtttctccgggaaatgatatggtccgtagttattggagcagcggctgatagatacaggcagtccgtaggttctgtggtaagccagtaccagaaggtctgcagaagccttggaagagctgtaagggctgcttgtgtggatcggagtttcctctgtgaagaacaggtcaggtctgtctaatggaagatctccgtaaacttcatcagtggatacctgatgataacgcttgataccgtatttgcggcatgcatccataagaacagcagtaccgatgatatttgtggtaaggaaaacttccgggttttcgatggagcggtcaacgtgactctctgctgcgaagtttacaaccatatcagggtgttcttcttcaaaaagtttgtaaactgcttcgcggtcggtgatgctttcttttacgaaacggaaatttgggttgtccatgacaggtgcaagagtggaaaggtttcctgcataggtcagacagtccagacagatgatgcggtaatccgggtatttttttaacatgtgaaaaataaagttgcttccgataaatccggcaccgccggttacgataatgttcatagtgattctccttaaaaaatatataatatgaatatctgtaagattctgttatagagtcaggcagataaaattatccgccttgctgcatggcgggtgatatatcaaataactgtttgaaaatttgatatatcactcacttgactgcgaattcgcttgtacaggtctaaaagcttcggttagtgcaatacatccagatatttaccgtccagaacgtcttttaagtactgaccatactgatttttcttcagtatttcataaaccttcagcacatcttcctttgtaatccagccattgagatatgcaatctcttccaggcaacctattttgcggtgctggtggctttccattgtttttacgaaattggtagcttctacaagactttcatgtgtgccggtatccagccatgtgaatccctgtccgagaagttctacgtttaattcgcccttttccagatagatgcggttcagatctgtgatctcaagttcgcctctggcgcttggtttcagattttttgcatactctacgacgcgattgtcatagaagtataaacctgtgacacagtagttgctcttcgggtgctcaggtttctcttcaattgagatagccttgccttcatggtcaaattctacaataccgaatctctccggatcatctacatagtatccgaaaacagttgcaccctcgccggattctgcgttctttacagcagctttcagtcttttcttcagtccatgtcctgcgaagatattatcgccgagaaccatggcaactgtatcattaccgataaattcttcaccgatgataaatgcctgtgcaagtccgtccggacttggctgtactgcataggtgagatggacaccgaactgatgtccgtcaccaagaagttcctcaaaacgaggagtatcctgcggagtagagatgatcaggatatcgcgtatccctgcattcatcagtacagacatgggatagtagatcattggtttatcatagattggcagaagctgtttggatgttaccattgtaagcggataaaggcgtgtgccggaaccgcctgctaaaataatacctttcatgtgtattctcctttgttattggcagtatgcggtcggagcgatattctgtcagttatctgtgtaaatgataagcaaaatatcaggcgactgcggtactaatcaacgggtttctggattgtcagtctgagttacgatatcatcctgactctggtgattgtattataaaaggtgaccttaggtcaccttcaagcatttttttataattttggtaaaattgttggtttttacttataggacagagannnnnnnnnncttaggtcaccttcaagtactttttacaaaaaagttaaattttggttatttttcacaaagaaaaatgccggcatccttggtaataaagaacccatcctttgtctttcgcgatacaaatccacggaaatctttgtatttgtccagaagatactgattctgatttccatggcaggagaggatataggaaatcagcggttctgcatcggggacaagaagagagtccttatagctttcccagaaaatacgggaaaaatacggtgccaggatatctgctccgttttctctgccaaaacgctcatagagtctgtctgcggagagaacgatccggtcgtcaaaatcccggaccagtctgctgacttcctgcatgtgtttttttccataggtactgcagatcagttttccgcctggagtgagcactcgttgaatttcgctgcatacagcagagatatcttcacagtaaaaaagcacatggtttgcaatgaccagatcaaagcttctgtcttcatgaggaattcttgcacagtcaaatgcctcgaaggaaaaacggctgtctttgcgtccgatagcacgtctggcatcacgaagcattccggatgaaaggtcagaaagagtaacggaaactttaccggggaggctggaaatattctgtgtccacagaacaccgtcgccgcatccaagttcaaggatacgcatccccggatgaatctgacactgctcataaatccatggaaaccatccctgtttattctgggaataaaggctgtgcagattaatgcgtgaggaaatgttggaggcgttctggtattgatttttcatgcttttctccatgcctgtcaggtggatcaggtcaagcatctgattccagtctatggcatgatgggagcggatcgcatctgtggtatcctggattgccttttccaccagctgcatttgttcgatacggtcacgtaccagctttagctggatgttcagggaattttccataaaatgatagtctgagtcgtcaatggtcatttcccgtatgtcatccagggagaaacccagatatttcagaagcaggatctgggaaagtcttgcaaaatcctcatctgtataaaaacgtgcgccggattctgttacataggagggtttgaggatattctgtttgtcataatagcggatagtgcggagtgttacatgtgccatccgtgcaaattctccggaagagtagtagccgtcttttttcattgtaaaaccttctttaagaaaaatagtcttgcccgcaaatgcggatagaaacagttgttcagcctgcatttgcgtattgctgatatgtgtagagtataacacagctgaccggcaggctacaagcatcaggtattaccggatggataatactatactggctgaatggtaagtcagatggtgatttttgacattttttggaggatgctaatccttgtcttttgacagaaattatggtatgttaaataataacaatcaaaactgattttcatacaaatcataatctggcagttctgccatattttttccaaaatacaataaatattaagagagaacagtaatgacaatatgaaaggtgcagggacaggaggagcctgatgattaatttatttgattttacttactgcggagactataatcggcagattcagaatctggcaaggatggtgccggagaagtggagcttttcggatacagatgataacggaattctgaaaggatacctggaacatacatttaaacgcctttatgaagaacagaaggtgtgggagaaaaagaattatgccatatttaatacaggactctttaattactattatcagccgatatatgcgtattttattcccaatctggtcccggacaggcagccctggtttctggatggcttttatacagaatactatttgttaaaagaaggaatcacctgtctgccggaaaaggcatgctatgtggaaaatccgtcagatcttgtgtttgatacaaaacttccggtaatcccacagtacgagcatattttcggggatgaggaaaatgctgcccgtcttccaaaggaagtacgtgacagcagcatgaaaatgcagctgtttgacggcgcgctgaaacagacaaaaagaatgcttgaggcagattacaggacggcaattccacagtattataatcactcaatccagctgctgctcccaatctgtctccgtcatccgggaaaacccgaccttgcactggcgtgtatgaaaacttcggacggaagcaaatatctggggcgtacctgcctgactctcagaatggcctatcataatgccaggctccttgcaagggtggaccgaagctggctgatgacttctgtatctgcctgaggtttgacatgtgtggttcgctttgatatattatagcagcgaagcggatgattttatctgtctgactgaaatgatgtcaggttagatatttttacggattattctgctgctatagatgaaacaacagaaaaaggtgggtgagaaatcaaatgcgaaataaaagtctggatgctgtaaaggccattgctgcgtgcctggtggtatgcatccatgtaagctttccgggacaggccgggcagcttgtaaaagtactggcaagatgtgcggtgccgtttttctttatggtatccgggtatttctgttattatcaaaattgcaatgcctcaaaaagaatattgtctaaaatcctgcatatcatgaagctttttgcagtttcagttgtgttttattttatctgggaatgttttatgaaagcctggaatggggagagagtatggacatggataaaagggcttgtgagtacagagcatctgaaggaatttttcgtgtacaacagtacttctccggtaagagcacatttatggtttcttcctgcattaatttactgttatctgcttgctctcctgattgaaaaatggagaatgcgtaaggctgcatattgtatggcacctgtattgctggcaatacttttatggagagcggagttttgtgtcttttttgacagattttatcacactatggaatacagaaactttctgtttacaggaatgagctttttccttacaggtcagatgatccatgaatatcaggataagatagtatgcaaacgtctggagcaatggatgcaatggggattgaaagcagggatgagtttcggtgtggcactcagcatgatggaatatgctttccggggggctggagaaatttacacaggaaattgtgttgcagtgatctgtctgtttctgtggcttattttatatggaagggaaataaattttccctctgtactggtggaaaccggaagaaaatatgcgttcctgatctatcttcttcatccggcgatgtcagaccttctgaaaaaatgttcagaaggtctgggagtcagcaactgtcagatttatttttggctgcgtccggttttggtatatatgctgacagtggtgacagtttctggcatatctgcggtctctgcgtatgcaaggcaaaatattttgcagaatgatcatgtatagtcagggtatgaaaatccggaatgaattttggctgcgttactgagaatggaatgaacagtaacatagtaacgttatcttcaggaaccgcgggaattataactgttcacataatggaaaatgtgatatagtaatcagtaaatcttatgaacgtaaccgtccggtgtttcgcagaatggcggactgctgaacagttaccggaaatcattatgcagaaaatacaaaggagagagaatggcagaaaaaaatcagaacatgaaccagagcaagaacagagcagaagagcacgatgaaagtgtgctgaatccggagattaagaatgaatcggatctgtcaaagaaggaaagacgtctgattgagaaagaaaaattaaagggaatggggccaaagaaaaagctggaatatatctggatgtattataaaccggctattttcggagtgatcgcagtgattgctcttatattcggaataaaggattactatgaacagtccaaaataaaaacagttctgtccatgacagtggtaaattcaatggcaaatgatacggaaactcctgagcagaaaatcaaagaaacacttgggtacaaagatgatccctatagtaaagtagagataggcgtgaatcttactacggactctgaaatggcagaatttgattataatgcacagatggcttatgtggcacagatccaggcaggttccattgatattatggttatgccggagaagctttatcagactttgaagaagaatgagccatttgcagatttgaaggaattgatgggtgaggaagcttttgagaagtttggaatgcagacagatactacgcacatttccattactgacagtgagcttgaacaggaattaggtgtaatctacgatcctgtatgcattgcagtgccgtattcagcaccgaatcaggagaacgcagtaaaatggataaaaagtcttgacagcaggaaataaattgtgatatgtttatcacaccaaaactggtgtggatttttcagtcttgtgacaaacatgaactcttttcgccgcacgattatcatacagcaatgtagagataattgtgtggcgttttttgttgcaatgaaacagagaaaggaaaaaagaatgaacaatacttttatgaagaaaaaaccgattctgccgcttctggcatctatggcaatgcctatggtactgtctatgctggtgaattcactgtacaacatcgtagacagcttttttgtggcaaagatcagtgagcaggcgatgacagctctgtctctggtatttcctgtacagaactttattaatgcagttgccattggtttcggtgtgggaatcaatgcacagatttcttttcaactgggagcaaaaaatattaaaaatgcgaatatagcagctacccatggtatgctctttaatattatccatggaattatttttacagtaatctgtattccgtttatgcctgtatttctcagtatgtttacaaaagagcaggaagtgatctcatctggtgtgcagtattcaaccattgcatttgcattttccacagtgatcatgatcagcctgtccttcgaaaagatttttcaggctgtgggcagaatgaaactgacaatgatcagcctgatgatcggttgtatttccaatattatcctggatccgctgctgattttcggagtggggatttttccggaaatggggatcagaggtgcagcactggcaactggtcttggccaggtatttacagttattgtatatctgatcgcatataagaagtgtagtattccggtggagatcagcaggaaatatctggaacttaacaggaacctggacgggaagctgtatatggtagggattcccgcaatcctgaatattgccctgccgtcagttctgatctctttcctgaatcagatattatcggctttttccggaagctatgtagtggttctgggaatctattataagcttcagacttttttgtatctgcctgcaagcggcattgtccagggaatgcgcccgttgataggatataattacggagcaggagaaataaagagggtaaagaaactttttgggatttctgtgcttctgaatggtatgatcatgctggtaggaacgatcatctgctttacagcatcagagacattgatgggaatgtttactgagaacccggaaactgtaagatttggcactgcagcattacagattatcagtatcgggtttatcccatctgccatctctgttacagcttccggtgcattagaaggactgagcaaaggtgctcagtccctggtgatttcgttattaagatatattatagtgatcattccggcagcatacctgctgtgccattttgccggggcagatgctgtgtggaatgcgttctggatctgtgaatttataacagcagtagtagtaggtatcgggataaagtattactggaaccgtctgctgcagtag

SEQ ID NO: 146 - DNA, 19079 bp, unidentified
  source 1..19079: mol_type = unassigned DNA
  misc_difference 16669: note = a, c, g, or t
  misc_difference 16670: note = a, c, g, or t
  misc_difference 16671: note = a, c, g, or t
  misc_difference 16672: note = a, c, g, or t
  misc_difference 16673: note = a, c, g, or t
  misc_difference 16674: note = a, c, g, or t
  misc_difference 16675: note = a, c, g, or t
  misc_difference 16676: note = a, c, g, or t
  misc_difference 16677: note = a, c, g, or t
  misc_difference 16678: note = a, c, g, or t
atgaacgtggaaggacagtataatccaaaagatgtagagtgtatttcggtagaaaaccttgaagtgctgccgagtggagcggattggcagagccgacatctggaatctgaaaggcgaaaagcagagattcgtgacagaatccataagcaggcagaacagggccagaaaacggcaaaagactactttcgtccggcgaaaccgacaccgtcgatttacgacagcgacctgaagcgtgtagccgtttatgcccgtgtcagcacttccagcgaagaacagatttcttccattgaaaaccagactctatattacaccaaaaagattgcagaaacggaaaactggaatttgcaggacatttacagcgatgaaggaaaatccggcacatcgctgcggaaacgtgatgcgtttaaacgcatgatgcgagatgccaaagaccagaagatggatttgattatctgtgccagcatttcacgttttgcccggaatttttcggattgcatgacgcagatcgcggccctgaaaaccatgcacccagcacatcccattggcgtgtactttgaaacggaaaacatctacacgctgaatccaagcagtcaatacagtcttgacattcaggctcttttggcagactgggaatcgggcaacaagagccgccggatgatcctttcgtatgaccagcgcattatgacaggccagtacccggtggccgacctgatggggtatcggcataccaaagatggacagttggtaattgagccggaagaagcaaagacggtgcgttttatctttctggcgtttatctatggttataactgcgatcaaattgcggcagtgctgacgcagaagaagcgtagcaccctgcgtggcaagcaggagtggaatggcatgatggtggcaaacatcatgaaaaatgaacgccgctggggtgatctggaagcccggaagagcatcgtggtggactacaagctgggcaaggtcacaaagaataatgggaatcgctgctctgcctatgttccggaacaccatgaagcaatcgtttcgccggaaattgcacgggctgcacatctggtggcatccagcaggaagaagtgcggtgtgcaggatattgtggtgatccagcagggaacattgaaaggctttgttggcatccatccgaattggagcggcatcagtgttgaaagcatccgcagcctttgcctgagcacctatctgccggaagaggtgatgaaactgaacgatatagcagagatgagggctggggcaacactgggaaaggcacttcaatctgaatatatgacggcttcaggtgcttgctttatcaaccagagcagcccggttatgacgatttctaaaaatggaatccgtttcagcaaggcctgccatagccggttggacgactgcgagtatgtggaactgctctatcatccgattctgcaggtcgtgattttgcgaaagagcaatcatggcttttcaacgacgatgcgctggagagatgacaatgacgttcatagtgctttttcagccagatcattttctggactggtcttccaaacattgaactggagaaggaattgccgctatcagtgccgtggtatctgccggggtcagggaaatgcaaaatttctgatttttgaattagatgagtcccggattttgactgggaaaaatcagtatgaacaagaaaattgttcgatgaatctgaaatgccggctatatcggagtaaatgggttcagagcattacagttagtgatgtgatggaatctggccaagtcgtagaaaatcccatgattggtgcaattccaagcagaaatgaagttcaacgtgaactggatgatcttttgatgtcgatgtagggggaacttatagaatggaagaaaaaaacagggcgcaggaactgagcgttcgggaaatctccttgattcgtgagttaacgcagatacgaaaagaacataaaagagaactggagtacgaaaaattcgatggctatgaacttccaccgcgcacccagttttccatgctgaataaacctgcagtgagcataaaatatggtgttatgaaatttaatatggcgtgcattcggctttttgaaggaatcaagtatgtccttccgattttgcaccccaataagaagcggcttgcgttgattatgtgcccggaagaggacagtgcatctgttgaatgggcaagacagaaggacgaaaactgggtgaataaggatattacatcattggaatttgtggaaaatatcttcaggctcatgaactggaatcgggaatgccgttataaagtgcttggacgggtggctaattcagatcagggtctttgtatgttgtttgatttggaagaagcaatcatgttcaccccgaagccacaggaatatacagatccgcttactggtgaaatgaagaaaaagcagatgaaattcttcccggatgcctataagaaccgtatcggaaaatcttataatgactatattgcagaccatcagatgaacatgtttgaagacttcattgggtatcagggctctgcggtattggatgagcctgtgcaggaagagaatacagcgccgaagccaccaatgagacagaaaagcgaaccaccggaaaatacagcgctgccccatttgccggaacaatctgtgaatatgcagcaattgagttatgagtctgacgggagaggaatgccgacatgaattctggacgagttatgaacctgcgagtgacaattccggcggaaagccggagaatgaatgttgggaaagatgttatccgtattcttggaagtccggcctatatctgcgttttgcagaggaaagatcggaagtctattgcaatcacgccgtgtgctgcggagcatcccatgtcctttaaggtcccggacaggctgctgaccgatgggcagtgtcggatgatgattaacggaatacagttcattcaggtgttgctggaagcaaatggtctggcggcaggaaaagaccatcagtttaaaggacggtatgatgccgagaaaaatgcagttatcatttcgcttgaaaaagatgaacaaagtgccctctcgccttaaaagtgtacaacttgacatcacgtccatttgggcgtataatacgtccaaatggacgtgatgaagggagccgatattatgcgtgccggaattttagatggctttcaaacgataattccaacagcagcggctgtcttatcagaaagacgacaaatgttaaggatgacgcaacaagaggttgctaatcgggccaatataactttgcgtcaatatcaaaggctggaatctggggaaagaaacattttgacttcttcttttggcttggcgtgtcgggtaattgaagctcttgatatggatgtttctaaattctatcatggtgactattaccttgaagaattgaaaactattgaaggaaaatgatttggtgacaggggaaaacatcaatttaaatgacggcttgatgccgaaaaaagagcaatataaaaagaattatcccgtggaaacagggaagataatccgtgaaaagtatgaaaatggattgattcggaatgaacatgaatttgaggaggtgctgaataatgtgctatttagtagcaaaagatcgtaatgcacatggttgttttgctctaaaaacgacgcatgggaagcatctggtggaattaaaaagagaattgaacaaagaggttgaatataagggagtacagcttgtaacaatcagcaggccaacagcgtatggtgagtatgcgccttaccactttgtggatactgaacgagtaagaattgaagaaagcggtacaaaaacagatgtgacaagattgatttcggcacgaatggctaccgaatttgaaagggggctttattatggtaaaaacgagtgaaatgtctatggaactgaaacaggaacttgcatttacaaaagaagaactcgcagaactggaagcggcaaagaaaatgccaatcacgtttgatgcggattgccctgaaaccacacctgagcgggcggttaaatttagaagagttaatccgccgcgtaacagaatggatgcccatggagcataatcacaatcaagaaaagaacgtatagagcgcaagtaagccctacaaggctcagatcggttcggaaccgactgaaacccttgtagggcttatttttttgcaaatttttttgttccttgcttgacaaccgcatagggtcaaccaagaaaaactacgataactaaagggttttgacggcttgagttgtccttcaaaagtttatttgttgaaaagactgcaagaagcgggaaatcctgggggttatatgtaggaggcttttggaagctctgttttgacccacaaaaaggagcagcaaataaagattgaaggagagttcaagcctacggtggattgcctttgtgcgacccgccgtaggcttattgctgttttataaagagaaaaatgaggagaatgaaaatatgaaaaattataaaattgccgtagcaggcactggatacgtcggtctttcccttagcgttctgttagcacagcataatcaagtgatggctgttgacattgtgcaagcgaaagtggatatgattaacaatcataaatctccaattcaagatgattatatattgcacgagaagaagcaaagcgtcattagtagagaaagaaatccggagctcaaacaagctctgcaagacttggatgactacctgttcgggtggtgaaattatgcgccatttcccagttagggtacttttttctggaagttcacattaacattacgacttgcaaagcaacagcatgtgtgatatattgttttaatagatgcaattcacttataaggttaataagattaatcaattgtagaaaagttactggataattatctacacattcctatgtgccctgtagtgtgtctgctctctcaagtaattataaaaaattcaactatgctgcgtatagtgcgttctattatttgtttttgttttgtagcgcagcggaaaggcatggtcataaacatgaaagttgtaattctggccggtggtcttggcacgcgaattagtgaggaaagcgtttacaagcccaaaccgatgattgagattggaagcatgccgattttatggcatataatgaaggaatattcctattatggctttcatgatttcgtgatttgtgctggctacaagcagcatatgataaaggaatggtttgcagactacttcctgcataccagtgatattacatttgatttcacccatggcagaaacgagatgattgttcacaaccatcacgctgagccgtggaaagtgacggttgtggataccggactcaatacaatgacgggcggtcgcatcaagcgtatccagccgtacattggcaacgaagcgttcatgatgacctatggcgatggcgtctgcgatgttgatatttctaagttggtagaattccataaagaaaatggtaaaattgcaacgctgactgctgttatgcaggagcaacagaaaggcgtgctggatatcgcagaggataacagcgtatgttccttccgtgaaaagaaagcaagtgacggatctttgatcaacgctggctacatggtgctggaaccgcagatttttgattatctggatggagatacctgtgtgtttgagcaaatgcctctgcagaaattggcagaagaagggcaattgatgagttacacccataaggggttctggcagtgtatggatactgctcgggaaaaacagcttctggaaaaattgctggcgacaggcaacgctccctggaaaaagtgggaggattgatcatatggtacattacgatcctaaattttactgcggtaagcgtgtttttgtgacagggcataccggcttcaagggaagttggctgtgtaaaatgctacttatggcaggagccgaggttacaggctatagcctggagccgcctacacaacccaacctcttttcccttgcaggaatagaagatcagatgcacagcgtcatcggggatgttcgcaattttgatagtttgaaagcggcctttgacgatgcacagccggatattgtgctgcacttggctgcgcagcctattgtgcgtgacagctataaagatcctcgttatacttatgagacaaatgtgatgggaacggtcaatctgttggaatgtgttcgtctggcccagcagcagggcaatgcccctcgctctgtgttgaatgttacaacagataaggtgtatcataataacgaatgggcttggggttatcgagaaaacgagtccctggacggctttgacccctactccaatagcaaaagttgctcagagttggcaacacattcttatatcaacagtttctttgccgacaaggttgtagctatttctacagcgcgcgcgggcaatgtcatcggcggcggcgactttgccaatgaccgcatcatccccgactgtgtgcgcgccatggctgcgggccgtaagatcggcgtgcgcaacccctactcgacccgcccgtaccagcatgtgctggagccgctggcggcctacctgctgatcgcccagcgccagtatgaggacagccgctttgcgggctactataatgtaggccccgatgactgcgactgcgtcaccaccggcacgctggtggatctgttctgccgggcctggggcggagacgccgcctgggagaatcaggccgaggccaatgccccgcacgaggccaacttcctgaaactggactgcagcaagctgaaaacgactttcggctggacgccgcgctggcacatggccgagtgcatggaaaagaccgtcgccttcagcaagatctggcttgccaacggcgacgtcccggcggagatggaaaaggaaatcaacagcttcttaaaggggcagaaatgacaaaggaacagaggagcatagcaagcgcttatgtcatttcggctttggtaggcggagtctatctgatttcctggctgacgcatgtatggggcggccagctgtggcccatcaacagcaacatggtcaactatgccgtggttttggtgctgttcggcattgcgcttttgctgtttggcaatcttttcgcgcgtactctgccgcaggagaggggctttgtgcaagcctgtgatgcgcgcctgaaggaacgcagcgccgcggcagtcatgatcgtcacagcactggtgacagccgtctaccttatatattatgcctgtatcggtgttaataaggaatttgccggtcctacctgcgcagagtcctcactgacggcgccacagcttattccggtgtattacctgcttacggtgctcttttttgtggcgacaatctatctgctgctgacgggcagggactgcccacagtggatgacctggggcggctacggcctttcggcagtgatgtacttcctgggcgtatggatcgtcaatacgtttgagggagacccataccacggcgaggcctatctggaaagcatctataatgtggcggatggtgttccgtatgaggagctgacaaccggcatctacggccactatggcctgtttttcttgctgccgatgaagatcttcggtgcaaaggctgttgttattcaattcctgatcgcactggttggcgttgtgacgggtctggccatgctgtactgcatccatcacctgataaaaaagaactgggtacgcctgttgatggcactggttgtgccggtcattccgtttgcatacagacggacgaattactggcagctgcagcctcaccgtttggtattcccgatgctgttggcagcctatatgctgttctgtttgcggaaaaagcagtcgaaaaaaacggctcggttctggggcggttggcttctgtgcatgctggcagtgctgtggagcaccgagagcggtctgttctgtatcatcggctggtgcgcgggctgcatcgtccgctggtggcaacaggagccatggtacgcccgcggccagtgggaacgctatggtgcgctgctgctgggcgctgtgttggcagtgctgggggccattggcctgacaaatttgtataacctggcctgcggcggagcaccgatcttcaaggtgtttttctacccgctgtacagcagcaattatatggatggctccatcggctacccgctcgagctgggcgtgcgcccatgggtgtttgtgctgctgattatgctggccgtgctggcatggtcgctgtttcagacaaccgctatcggaagaatagccaaaacggagaacattgccccatttacggcctgcctgtcggtactggggctggtatcgttcagttactatgcaaaccgctccgcctggatgaatctggagatctgcctgccggaggcactgctttgtctgtgcttcccgttgcaggcgctgacggacggggaggggctacgcaagaagctgggcggcctgtactgcacggcggcacagtctgtgggactggctgtactgctggtgctctgcgtgcttacggcacagctgcccggcggcgtgatgaatacagtgattctgcaggagcgcggtgcgttcagcacccgcggcatctatgcggaggtggagaatttctctgccaatataccggacaacacctttgcggttggccgcgatgtgggaatcatctaccatgcagcaggctgggacaactacggacattatgtggatgctgcggattacggcgtggcagataccgaaaaattactccctcatattctggcagagttgaaggcccagccgagctttgtcgtggatgacatactgaggatctatctggggcagaatggctacacgcccgacatgctcggataccagctgcagacgaccttcacatcggctggcggtgtgaaaccaacgacctattactattatgaaaaacaataaaaggagagaaaaacctatggcatggaagaatgaggcagaagcccgcgagcagatcaaggcaatggtcgccgagtactatcacgacttcaaggagaaaaagacctcctatcaggagggcgaccgcatcacctacgctgcccgcgtctttgatgagaaggaaatgtgcgccctgaccgacgccacactggacttctggctgacgacgggccgctttgccgatcggttcgaaaaggaatttgccaagtggattggcgttaagttcgcccatctggtcaacagcggttcctccgccaatctgatcgccttcatggcgctgaccgcccccgagctgggtgaccgccagatcaggaagggcgacgagatcatcaccgtggcctgcggcttccccaccaccgtgaccccggccatccagtacggcgcggtgcccgtgtttgtggatgtgaccgtgccccagtacaacatcgacgtcaccaagctcgaggccgccctctcccccaagacgaaggctgtcatgatcgcccacacgctgggcaacccgtttgacctgtccgctgtcaaggcgttctgtgacgcccacaacctgtggctggtcgaggacaactgcgacgcgctgggcacccagtacaccatcaatggcgagacccgctttaccggtacatggggcgacatcggcacatccagtttctacccgccgcaccatatgacaatgggcgagggcggctgcgtttacaccaacaacccgctgctgaaccgcctgatcctctccttccgcgactggggccgcgactgcatctgcccctccggccaggataacttctgcggccaccgctttgacggccagttcggcgagttgcctaagggctacgaccacaagtacgtctacagccactttggctataacctcaaggtcaccgacatgcaggccgctatcggctgtgagcagctgaagaagttccccacctttatcgagcgtcgccgtcataactgggatcgcctgcgtgcggcactggagcctgctgcagataagctgatcctgccggagcccgctgccaacagccgcccgtcttggttcggcttcctgatctccgttaagccggagagcggcctggaccgcaacgccgtgacccgctatgtggagagccacaatgtgcagacccgtctgctgttcagcggcaacctcatcaagcacccttgctttgaccagatgcgtggcacggacgcataccgcgtggcgggtgagctgaccaatactgattttattatgaacaacaccttctgggttggcgtttaccccggtatgaccgatgaaatgattgactatatggcaaaaacaattattgaggcagttaatcagtaaaaacacatcgaagaggaatcatacatgaaacagcaaaaagcaagaccgactttctgcaaaaatttgcaaaaagcaagcaaaccaacgcccatgcaggtatactgcgcggcaacgattctttgcttagcggccttgctttttgctgttttggtaagtcatggtgatattgtaaaccagtacttcttctatgatacgctcgacacgggcatggatttctttcacagtattgaatatgtgaaaggccgtatgccgtatgggcagttcagtacactgtatccgccgcttgcaaatctgttcttttacggattgtatcagctggtgccaaaatccctttctgaagaatggcagcaatcgtttttggattctatcagccagcgcggcagccagcaggatttgcggctgcatcagggaacgatgatgcttttcatcctttttgtggtgctggccgtgctggggattgccgctatgacagagcgcttgacccggaactgcggcggcgagcgtaaattgctgtccctttgcgctgtgttcagctacggtgtgttgtatgggctggagcgcggcaaccttctgctgctttgctggccgttgatggcgttctttattgtaaaccgcaaatccaaaaatcctgttatacgggaactgtcctacatagcgcttgccattgcggccgggttcaagctgtatccggcgtttctgggcatattgcttttgcgcgataaaaactatatggcggccgttcgcacggtaatatacgggattgtctgcctttgcttcccgctgtttttcttcaacgagggtatgtttggtctgacgctttggttccgggtgctgtttgaattcaccggtgacagtggacacccgtggataggcaatggctttgccaacattgtggcggaatttgcacatggaatcgatatgctgctgggcacaagtctggcagatggcagctatgctttgctgggaattctgctggcggcggtgctgctggtatgtgcattgcgtatggaccgtgagtggaagcgcgttctggcgattgtgctggccatggtgatgttccaatcccagtatgattatgtgtggtgcttgtttttactgccgctgtgtgtcttttttgcacaggagaacgaactgaataaggaaaatatcgttccctatttgctgatggtcttgctggttataccactgccgcttttccgtgcggatgaattgacgccgacatttaccatacacaacactttggggcatattatgttgattatgctccttgtatggtgcatagctgaaacagcccgtagaggaaagaaaagtcctgctccgaaagcagttggaaacaatcgcagacagctatgcgcaacggctatattggcggtttgtatgctagcttgtggatttggtggtcaagcactttgggaaaatacgcataactggggctttgactacagctataatggacggattggagacgaaggcgtcctgatgcaagacatacaggacagcagcggcaataccgtaacggttcagtggagcgggcgcggggcttatgtcataatttataatcatgcaccgtttgcacaggagatgacaatcgagtttgaaacgggatacggaatggatttgcagcaagcacataccatgacattcacggtggaagaaaatacgcaagagagtatgctgcgtgaggaaaaaccagaaccgaaaagcgtaaaaattgaacgcgaaggacagaaagtgacctataccgtaagcgtggaccccggacaaaccaaggttgagctgagctatgacggccccatggctgtctacgatgagaacacgcgcaaaaacgggacattttccgttaaaaatctgacagtcaccagtgcgggtaaaccggaagagacagcgtaaggaaaggaaaaatatatgcagaaactgcttgccttgctgggcgcaaaaaataaagaggagtttatggcgctgctgatgcagtttatcaagttcgggctggtaggcgtgagcaacacagctgtgtctatggcggtctactatatctttttatggatcagcccggatttgtatatgctgggcagcattctgggcacaattttaagtattgcaaacgccttcttctggaatgacaagtttgtttttgccggcaatgcaaacgactggcgcagcaagctcaagcgtctgggaaaaacttatgtgagttacggcggaacgtcgattttgtccaatgttctgctctggattgaagtaactttctttgcagtcagcaaatctattgcaccgattgtaaacctgttggtgacaattccattgaattttatcatcaataagctgtggacatttaaggaaagtaagaaagatgcgactttcagtttggaaaggtaaaaaatgataaaacgcttgaatagtacggataaaagatattatatatttatgattctgactattgcagttgcagcattttatgctgcgctgatgtgtaacaaaacaatgcctttcgcggagggatggtatacatattatgcgcaacttataaacgaaaaaggtttgctgccttacagagattttgaatatcttttttcgccgctctacatttattttattgcgtttatcacgcgctttttcggatatgatattttgacactgcggtgtgttggcatcctaatgtttgtaataatcgctttaggggtatatttgtttattacagaaattgttggaagaaaaaaggcgtggattgctgcaattacttccgttacagcggttatgtatctacagtcagaagtagttcagattttttatgactacatccgacttatggacatttttgctgtttttaccgttttattcttgattcgcgctgtcaaagcaatgcagcacagcgaaaatcaaggcgtaaaagtaaatctttttctttgtggtcttttcaattccctcttcataaatgtaaaacaaaatgttggattgattttttgggcatttacaatagttctaattatttacttaggcgtgtattttcaacagtccataaaagcaattgtaaagaatttaatgcaatttttattgcctattgtagcagtaacatgtgcaatttatttgttgctggccgtaactgggggattgaaaggatatttgtccatgacgggcggaggcgcaattagcgcaaaaggcggtatgattgcgattctctttaactgggtgcccaataactggaacttattccaaaatgcgatgccagaggccagtgttgttttacttgttgtagtggctttgatggtggcccttgccatagcagaacataaaaacaagatggcacgacatgatgcaaatggcgcatggagtaagattgcggatatacacgggggggggggtacctgctggcgataggattgctattggttatggctgttcgccacaaagacatggcagtggcaatttcggattggaagtcagtaacaccgtatttcttttttgagattgtatttccagcttttttgttgtttggtttttggtttctctataatatcattaaaaaacagcaaaacgcagagacatttttgctgtggtttacactggcaggctcttatgtggcaatatcttggggctgtggaaattccggtggattagcagagggacaggcaacaacaggagtggcatttgttgtcgcatttattctgtatggactaagctatcagtggcttcagatattacaggtggtagcggtagtcgcttgcatcggcttaacgattcaatcttgcaccaaaaagatggtgaatacctataattggtggggagcagatgaagcagatttttgggcaagtgagaacaatataggagatgttccgctgctgagcaaaattcgggcatctacagatacaaaggctgtgtatgaggaaatctgcaaggaaataacagagggagtgcaggaagatgaaaccatctactgcttcccgcaaattcccatattttatagtttatgtgaccgctgggatccgggggtacgctctaaagtagaatggtttgatgtgtctacggatgaagcagtagaagcagacattgatattctaaaagaatcaccacccaaggcaatccttatgtacaatgtgggtgatgatgtctatgaggctcatgaaagcgcatttcgcaaggggcaagcatccggaaccagaaagatgagagactttttgtatgattttgcgtatgctaatgggtatgaatttatcggcaattacactacaggaaataatgaacttacactttggattcagaaagacaatcgtaatgtgaatctgattgatgcgtttgatggtggtgatggcacaattgataacccctataaattacatactgctgaacaattgcgcttgtttagtaagatggtaaatgaggggagaacttttggcggtcaatatatcgaacaaacagcggacatagacctcgccaatcaagattttacgccaatcggtgaatattccggtaacaactatttctgtggcacatacaatgctgccggccatgtgattcgcaatctaaagattgaaacgaatgataatgcagccttatttggacgacttggcggtaaagtatataatctgggaatagaaggtggaaatatcacaggcgcttatatcggtggaattgcaagccatgccgttaaagatacagcagcaataattaactgctatacagatatttctatggatggaatacgtgcaggcggtatcgccgataattttgtaggaactgtcggaaattgctttagcgtagggttgatacatggtacggatagtgcagatgtattgagctttagccaatataaagaggtacaaagcgtttattccgttaaggaaaaaaatagtcaggacttcgatacacaaagtacagatgatgtcagaattacatattgtacggaagaaacaatgaaaaatggaatattggcacaacgattgaatgattctatttattcgataggtacagaactacaaaagagcgatggtactgaagataatgaccaagaaacaacaattgagttggtacggtggaaacagggaacggatggacatccggttttcgatgtgccatcgtaattgaagcagaaaaataagaaaggcagacaatcaaatgaaacagcgtttagcggattatgtggcggactttctggcggcgagcggtgtgacggatgttttctccgttgtaggcggcggcgctatgcacctgaacgatgcgctgggccataacccccggctgcatgtgacttacaaccaccatgagcaggcctgtgccattgcggcggaagcctacgcccggctggaaaataagatcgcggcggtctgtgtgaccaccggccccggcggtaccaacgcactaaccggcgttgtaggcggctggctggactctatccccatgttcattgtctccggtcaggtgcgctatgacaccacggccagatacgctttgcagtacaccggtacgccgctgcgcgccatgggtgaccaagagtacgatattactaaatctgtccagtacatgacgaagttcgctgccatgctggaggaccccaaggacatccgctacctgctggaaaaggcgtggcacctagccacgacggggcgccccggcccggtctggctggacatcccggtcaacttccagggcggctacatcgagactgacgagttgcgcggctacggccccgccgaggatgacgcccagctgcccccgccggtggacgacgccacgatccggacgattctggaaaaaatcaagaacgccaaacgacccgtgttccacgcgggctatggcatccgcctgtccggcgggtatgcggcgttccgctccgtggcggaaaagctcaacatccccatcgtcacctactggaacgccgtggacctcatcgaggatgacaatccgctgtactgcgggcgcgccggcaacatgggtgaccgcccgggcaactgggctatccaaaacgcagacttgattctggccgtaggaacgcgcatttctatccgccaggtcggctacaactggaagacttgggcccgcgcggcagaggtcatcatggtggacattgaccaggccgagctgaaaaagccgaccctgcacgttgaaatgccggtctgggccgacgcgaaggactttttgaccaagctggataaggccgccacggcccccgtgaacgcgggcggcgagtggctggccacctgccagcgctggaaacgcgactaccccgccgtgctgccccgccagtgggaggaaaacggagagaccgccaacgtctacgcctttgtgcgctatttaagcagccgcctgccggagaacagcctgaccgcggtctccaatggtgcctgctgtgtagtcggaaatcaggcgtatgttattcagaagggcagccggatggcaaataatagcgctgttgccagcatgggctacggtcttcctgcagccattggtacatgcatcagcggcgggcgnnnnnnnnnnattccgccgccagacgatttgtcttgaaggtgatggctccatcatgatgaatcttcaggaactgcagaccatcctgacgaacaagctgccgatcaaaatcttcctcatcaacaacaacggttaccactccatccgcctgacgcagaacaacctgtttaaggagcactgcaaggttggcatcggccccgagagcggcgacctgtccttcccggagtttgaaaagcttgcaaaggcgttcggctacccctactacagcgcccacagcaacgccgagatgaagcaggccgtggacacggtgctggcgctggacggtccggtattctgcgagattttcaccgacacgaaacaggtctgggagcccaagagcagcaccaagcgcctgcccgatggtacgctggtcagccccccgttggaggacctggcccccttcctgccgcgtgaggagctggagcagcagatgtttatcccgctgatgccggaagtgtaagggagtgcgtgattcgaaaatggcaagcattcaaagacaaatccgcaccgccatcatcactggccctacgggggcaatcgggatggcgctgtgtgcaaagctgctggcggagggcgtgacggtttacgcggtcacccacccgggcggcgcgcgggcggcgctgctgccgcaggacgcgcggctgcatgtggtgccctgcgacgcggcggagttggccgcgctgccggagctgatcccggaaaaggccgatgcgttcttccactttgcgtgggcgcatacgatcggcccaggccgcaacgacatgccggcgcagatcgagaacatccgctacaccattgcggcctgccgcgccgcggcgcagctgggctgccaggtctttatcggagccggcagccaggctgagtatggccgcgtggagggcatgctgaccgcacaaactccttgcttcccggaaaatggttatggcatggctaagctgtgcgccgggcagatgagccgtgtggagtgccaggcgctgggcatggcccacatctggacgcgcattttgagcgtctacggtccgcacgacggtccggccacgatgatcagcggcaccatccgtaagctgttgcacggcgagaagcccgctctgaccgcgggcatccagcagtgggattatctgtacgccgccgatgcggcagctgcgttctacgcgctggccgtcagcggacaggacggcagagtctacccgctgggcagcggcactgcccgcccgctgaaggactacatcgaggcgctgcgcgatgccatcgacccggcgctgccgctgggtttgggggaggtcccttacggcccgctgcaggtcatgcacctgcaggcggacacatcagccttgcaggcagacaccggttggtatgctgcaaccacatttgaagaaggaatccgtaaaaccattgaatgggcaaggaaagaaacaaaatgagtgagaaaaagacaatttcggtaatgatcccctgctacaacgaggagcagaacgcccgccccatctatgaggctgtgcgcgatgagttggtcaagagctgtccgaactatgactatgaaatcctgtttatcgacaacaagagcgaagatggcacacgcgccattatccggcagatctgcgccgaggacaagcacgtcaaggccatcttcaacgtcaagaacttcggccagttcaacagcccgtactacggcatgatccacacctccggtgactgcacgattacgatgtgcgcagattttcaggatcctgtggagatgattcccaaatttgtagccgaatgggaaaaaggttataaaattgtaattggtcgtaagactcagagcaaggaaaacggctttatgtattggctgcgtggttgctattacaagacgatcaagaaaatgagcagttgtgaacagattgaacagtttaccggattcggtttgtacgataaaagctttattcaaacattgcgagaactgaaggatccgacacccttcatccgcggcatcgtggccgagttgggccccgagcgtaaggaaatcgagtacacccagccacagcgccgtgcaggcaaaacccataacaactggtatagcttatatgatgcagcaatgcttagctttactagctacacaaaggtagggatgcgcctagctacatttgtgggatttatttttgcgggaatgagctttttgtttgggcttttttatttgattgcgaagttgttgttctggtataactttacggctggctatgcgcctatgatgattgcaattttctttatgggcggtattcagttggcttttcttggatttcttggtgaatatgttatggctatgaatacacgcatcatgaaccgtccgctggtcgttgaggaagaaaggctgaattttcagcagaaatccaagtaa

SEQ ID NO: 147 - DNA, 6618 bp, unidentified
  source 1..6618: mol_type = unassigned DNA
cttgaaggtctgctcaaagccgaggaacttcaggatgccctgattgacagaggggtggaagcgcaggccgcccttgtaggggccgatggcgctgttgaactggacgcggtagccgcggttcacctgaaccttgccctgatcatcgacccaaggcacacggaaggagatgatgcgctccggctcgaccagacgctcgatgaggccggccttctcgtactcggggtgcttctccacgacgggctggatgctctccagcacctcacggacagcctgcaggaactcaggctcgttggcattgcgcttctcgaggccctcgtagacacgcttcagatattcattcgtcagcatagtaagatactccttttcccttaactctatcgtgtagctctatcatgaggccccggctctcccgtttccacggcgaggacagcgaacctcagcacacttcgttattataaagctttatccgccgatttacaagatggcccgccctgcaaaagctggaaaatctttcaaaaaaactacagaaaagatgaacatacttcacaaaaaagaacgggtgcttcaaaaagcggcgataacacctgattttgcgaaagaataaaaatccccctgcaccggcccgggaagggcggtgcaggggggataagtcttacttcagcagcttctcgcaggcgtcagcggcaccctcgaggaactgtccgccgtaggtctcgatcatgccggcgtcggacagtgcggccagctgggggtcgatggggcacttggccagcacgggcaggtgatgctttgcggccacctcgtccacatggctgtcgccgaacacattgatgtgcttgccgcagtcggggcagacgatgtagctcatgttctcgacgatgcccagcataggcaccttcatcatctcggccatgttcacagccttggcgacgatcatgctcaccagctcctgcgggcttgccacgacgacgatgccgtccacaggcaggctctggaagacggtcaggggcacatcgcccgttcccggaggcatatccacgaacaggaaatcgacgtccttccagaccacatcggtccagaactgcttgaccgcaccggcgatgacggggccgcgccagacgacggggtcctcttcgttctccaccagcaggttgatgctcatgacgtcgatgcccatccggctctggatgggccagcagcccttgtcgtccgccatggcgcggccatggatgccgaacagcttcgggatggacgggccggtgatgtcggcgtcgaggatgccgcagtggtagccgcggcgtgccattgcacaggccagcaaggcgctggtcatgctcttgccgacgccgcccttgccggatacgacgccgatgaccttcttgacgctgctattggggttgggtgcgtcatgctggggcgcagcattgcgggaagaacacgctgccccgcagttggagcagtcatgggtacattcttcgctcattgtctcattgcgcacggccgtggtaccggggtgcgcttcctccttgcattcttagatcctgtctggcagaaaacgctccgccagatacaatatatatcatatcataaaactgggaaagaaacaacccacgccgccgctcatatttcccagagcggcgtgcatacctataaaaagatacgagcaggaaagggagggggcgcagtggggaagagctatctgaaaaacgcggccctgatgaccggagcagatgtcctgctccggctggcagggatggggctgcgcatctggctggcgaacgcgctgggcggcgaggggatggggctgtatcagctggtgctggcggtctactcgcttttcgtcacgctggcgacggcaggcgtatcggtggcggccacccgcctgatggccgaagagctggcccgaagcccggccgaggcccgggggatgctgcgccgtcttctgctggcgggggccgggctgggagtggcggcgctggcggcccagttcggtctggccggcctcgccgcacggtggtggctgggagatgcccgggcggcgggggcattgcgcgtctcgtcgctgggtctgccgtggatggcggtgtcgtcggtgctgcggggctttttcatcgcccggcggcgggtcgagccgaatgtcctgagccagctggccgagcagaccgtccgcatcggcatcgtctgggccgcgctgggccgggccgacgctctcggatggaatgcggggcagcgctgtacggcagtgctgggcgcaacggcggccagcgaggccgtcagcaccggtctgatggccctgttctactgccgggaggcccgccgctgcttcggctcacagcctgtacagcgtccccatgacccggggaggcggctctgggacatcctctggccggtggagggcgggcgatgtctcgccagtgccctccacaccgccgagaatatgttggtcccggcctgtcttgcggtctatctgcaatgctccggcgggcgtgccgaggctgtgacccagtacggaaacctgaaagggatggccctgcccctgctgacctttcccttcgggctgctggggagtctgtccgtcctcctgatgcccgagatcacccaagcccatctccgggggcagagcaggcggctctccgtcctcatcgaccggatgctgcggctcacaggctatttttcggcgctggcgggggcggcattctgggtgtggggacagccgctggccgaggcactctacggcagcgcggaggcgggcaactatctcgtcatcctcggcccggccatgccgctgatgtacctcgagagcatggtggacggcgcgatgaaggggatgggagagcagaaagccgtcttccggtacagtatgtgggactcctgcctccgtatcgtgggggtggtgctcctgctgccccggttcgggatgaaggggtttctctttgtgatcctcctgtccagcctctacacctgcgccgccaacaccgggcggctgctgtccagctgcggcctgccgctgcgactgtggcggtggctgggggcgccgggtcttgcggggacggccggtgccggagcggggctggcgctgcggaagcttctgaccccatggctggcgagaggagtgcccgcgcagctggcggcggtggcgctgggcggtgcggggatgacgctggtctgctttgcggcggcatggccgctgggcctcggcgaggagctgcgggacgtggtggcaggggagagaagacacaaaagcgctggacatggggagaagaatcgagtataatgatacagatacgatggggcgataggcccttgggtcgaaaaaacggcggctggcgtctctccgacaccggccctgatgcaaaagaggactttttgtgaaggaaaagaaaacaagtatgctgcaggtgctggcccgccgggcctttctggtggtgctggacgcagccatcgtagccttcagcttttattttgcgctcctgctccgcgcagacggcgcagtcgaggcctcgtggtggcctcacaaccgcgccctgctctacgcgaacctgccgtggatcgtggcggtctatctgctcagcttcttgggcgggaggctctacaccatcctctggaaatacgccggagagcgggatctcatccgtctggctgggatgatcgctgccccgacggtcgtggtgtatctggtcaaccgctgcttcatccatggcgtgctcttcaactcggccaacgcgatggcttcggtgctcatcttcctgctcgtcggcgggagccgtctggcgtggcggctcttcctgaaccacccgctgggcgagcggctgcggggcaataccagcaaagaccccaaccgccctgtgatgatcgtgggcgcgggcgaggccggtgcgtgggccatcaacgtctgcaagagcaacggcagctacggccacccggtggtggcggtggacgatgaccccgccaagctgggccagaccatccacggcgtcccggtgaagggcacgctggaggagatccccgacctgtgcacccgctacagcatccacaccatcatcattgccatcccgaccttgcggggcagccgcctgaaccatgtcatcgacctctgcgtctccacccactgtgcggtgcagatgctcagcgacccccagcttgtgggggcaggcgcaccccagcagggggcgttccgagagctgaatactgccgatttcctctcccgtgaggaggtcacgctggacacggcccagatctcgggctacctcaccggcaagaccgtgctggtgacgggcggcggcggcagcatcggcagcgagctttgccgtcaggtcatgcgcttcagacccgcgaagctgctcatcttcgatatttacgagaactgcgcctacgagctgcagatggaactacaacagaagtatggccgcgatgtgcccatcacagtgctggtgggctccatccgggacaaggcccgtctggacgaggtctttgagacctaccaccccacggtggtgttccacgccgcggcccacaagcacgtcccgctcatggagatcagccccgccgaggccgtcaagaacaacgtcttcggcaccaagaatctgctggtcagcgccagcgagcacggcgtggagcggctggtgcagctttccaccgataaggccgtcaaccccaccagcgtcatgggctgcaccaagcgcctgtgcgagatgctcatccagacctttgcgggcaacaccgacatgaagtgcgtggccgtccgcttcggcaacgtgctgggcagccacggcagcgtcatcccgctgttcgaggcgcagatcaaaaagggcggccccgtcaccctgaccgaccccaacatcgaacgctatttcatgaccatcccggaggccgcgcagctggtgctgcaggccggcgcattggctgagagcggcagcatctatgtgctggatatgggtgagccggtcaagatcatggacctcgcaaagcagctcatccgtttctacggctacgagccgggcgtaaatatggacatcaagatcgtgggtctccgccccggcgagaagctctacgaagagctgatgatggacgaggaacaggacaagatgcgccgtaccggccacaataagatcttcgtggctccgccccggaacatcgatcttggcgagttctatcagcaacttcaggagctgtctgccgccgccgagcacaacgacgacaacgtcgtggcccagctggccaagatggtgcctacctttacccccacccgagagaacctcaagctgtgaactgctggctgcacggcattcggctgtgtaaaaatatatgagagggatgtatatcatggaaaagaaaccgtttttgactgagtcgatggctcaggacatcattcaggacgtgcccacccccttccacgtctacgacgagaagggcatccgggagaacgcccgccgcatcaacaaagccttcagctggaataagggcttccgcgagtatttcgcggtcaaggcgctgcccaaccccgtcatcctccagatcctgaaggaagagggctgcggcgtggactgctcctccctgaccgagctgatgctcagtgaggtgtgcggcttcagcggcagcgacatcatgttctcctctaaccagacccccgtggaggacatgaagaaggcctacgagctgggcgcttatatcaacctcgacgacgccacgatggtggacttcctcgaccgggtagccggtgtgccggagaacatcttctgccgctacaatccgggcggcaccttccagctgggcgagagcaaggagggctttcaggtcatggacaagcccggggatgccaagtacggcatgaccgaggagcagatgatcgacagctacaagaagctggctgcaaagggagccaagaacttcggcatccacgccttcctcgcttccaacaccatttcggacgcctactaccccgagctggctgcgatcctgttccagctggcggtccgcgtccagaaggccaccggcgtccacatcgcctacatcaacctgtccggcggcgtgggcatcccgtaccgtcctgagcagacggagaacgacatcatggccatcggcgagggtgtccgtaagaaattcgaggagatcctggtccccgccgggatgggcgatgtcgccatcttcaccgagatgggccgcttcaccaccggtccttacggtgcactggtggcaactgccatccacgagaagcacatctacaaggaatacatcggtctggatgcctgtgcggccaacctgatgcgccccgccatgtacggcgcttaccatcacatcacggtgctgggcaaggagaatgccccctgcgaccacaagtatgacgtagtgggcggcctgtgcgagaacaacgacaagtttgccatcgaccggatgctgcccaagatcgacatcggcgacattgtgtatatccacgacaccggtgcccacggctctgcgatgggctacaactacaacggcaagctgcgcagcgccgaagtcctgctctgcgaggacggctcccaccgcctcatccgccgtgccgagactccccgcgactacttcgcaacgctggacttcctgcccttcatgaagccgctgctgggcgagtacgacgactaa

SEQ ID NO: 148 - DNA, 8900 bp, unidentified
  source 1..8900: mol_type = unassigned DNA
ctactgaagtaatgataatacaccctgattgctctggttagcctgagccagcatagactgacctgcctgtgcaagaatattattcttgctgtagttaaccatctcatcagccatgtctgtatcacggatacgagactcagcagaagatgtattctcagatacgttatcaaggtttgaaatagtatgctccagacgattctgtaaagcaccaagtgcggaacgctgtgtagatacaatgtcaatagctgactgaatctttgtcatagcagatcctgcagaactaaatgaagaaacagataatccacttacaccgatagatgaagaatccatgttgctgatggaaattgcaatattctgtccactcagcgcaccaatctgaaggttctttccactgaaagatccatccaataagttctgtgtattgaactgtgttgtagaacggatacgatcaatttcagatgataaagcatccatctcagactgaatagcgtttctgtcgatagtagtattggtatcgttagctgcctgtgtagcaagctcattcatacgctgtaagatagaatgtgtctcatttaatgcaccttcagctacctgaatagcagatacaccatcctgagcgttgtcagatgccttgttcagacctctgatctggcttctcatcttctcagaaatagaaagtcctgctgcatcatctgctgcacggttgatcttgtaaccagaagataacttctctgaagacttagcctgtgcgcttgttgtgattcctaacattctgttcgcatttgctgcggtcatattgtgctgaactaccatattaattttcctccttgaattaagtgcagcttccatgctgcaatttgatttgtttgtgacagttttctatgcggccgtacgctccgcttcgaattccatccgattttgtaagaaacaattgttatcttgtttacttgctatatatatcggacggggttggaaatactttagcattaattttaattttttcaatttttttctgccgcattttataataatgccgaaacttttccttccagtattgcatggatctcatccagatccttgcctgtgatggatgcaatgttttccggcgacattccgctgtggttcattttaagaataatttttgcttctcctacaacttctcccattgctttaccttccgattctcccagttttctggcatcttccaggtcatccttcatcagttctctcaacgcatcacacatattcgcatccctccttatttcacgatacaactcatcatttgccctgacacttacctgtaacacagcctctacattctgccggtcacgtggtgtattcattccttctgcttttctcagaaattcctccacgtcttctttctttgcatgatttgacaaaatcttcaaactccgatgctctcccggctctaattcctgtgtcacaataatctgcgccggaatcggtaaatattctgtcacataataaatgcccggatacctttcttctattttatgtccatacctctgcaatgtcaaaaacattttctccggtcgggcttccctgaaaatagatattgtcagttcattgattggaactgcatctacatattctccatagcctttgtacaggcacgcatacccgatggtcttgtaaaaatcgtcaatggtcaacgcatcttccgggctcttatactcgatcacattataggttctcataatgtgaccgatttcattcttaatttgtccggtacgcccttcttttatgataagaaggtcgatacggattggttccttgctcagattgtattccggctttaactccagccgttcaatgtcttcatggaattccagccccgcagcggcacagaatgccggatgccactggagcttgtctggtgcatttttcaaattgcttcctcctgtttgtgtgaatcacgattccgcaacatcgcaatttgttttcgtgcacaaatgcttagttttcacctctttccttttcgtttttccctctgcaatcttttcctgtctttatgataacctatttatttttctccatcaagcagtttcttgtatcccaaacacccgaaataatctcatcgttactgttcgcatcaaattgctaacggaatcaatgattaaaaaagtgatgatatattgttttttcttatacatcatcacttctttttactttcttatgttgtttttagatgctgcttataatagcgctgaaactttttccggttccatttttctattttttctccagccccggccactcctggtctttctctgaaagtgtcagcaacgttccatccgtcatgcaatacccttccgccgatggggttccctgatactccccctgcacatccggccactggataccgattgccgggtcattccatgccaggccgccctcgtcgttcggatgccagaagtcattgactttgtaacagaactctgcctcgtcagacagaaccaggaagccatgcgcaaagccttccggaatcagaaactgctttttgttttcctcggaaagttccactccgtaccattttccataggttgcggaaccttcgcgaaaatccactgccacatcaaatacgcttccgcgcacggcgcgcacgagtttgcactgcggatagttgatctggaaatgcagtccgcgcagtacgcctttgacggacatggactggttatcctgtacaaactggatatcaaatccggcttctttcatttcccgttcattgtaggtctccataaagtatccgcgggcatccccgtgtacggccggtgtaatcacacacagcccttcgatgccaccgacatttttttcaactgttatctgtcccactgttttttcctctttttcacatcattctcttaatatttcactctgccttctgcgactgcttttaaatgctctccatacgggctctttccgtagcgtatcgcagaatcaagtaatttttcccggtcaatccactgattgatatatgcgatttcttccggtgcggaaatggtcacgccctgacggtgctcgatcatctgcacaaatgctgccgcatccagaaggctgtccatcgttccggtgtccagccatgcaaacccacgtccgagcagctgcacatttaagtttttctgctgcagatacaggtcatttaaggtggtgatctccagttcgccgcgggcggatggctgcacctgttttgccattttgctcacgcctgccggatagaaatacagtccggtcacggcatagttgctctttggctgtgccggtttttcctcgatggaaaccgcttttccgttcgcatcgaaatccacgacaccaaaacgctccggatcgttgacataatagccaaagacggttgcctgtccctcttgtgcatcctttgcggcattgcgcagaatttttccgaatccgtttccgtagaaaatgttatcgccgagtaccatggcgcaggcatcctctccgataaattcctctccaagcaaaaatgcctgtgcgagtccatccggagacggctgcactttgtaggacagatgcagtccgaattgatttccatcccccaaaagtgcttcaaatctcggggtatcttccggcgtggaaataactaaaatatcacggatgcctgccagcatcagtgtagacagcggataataaatcatcggtttgtcatataccggaagcaattgtttactggttaccatcgtcaacggatacagccgtgtccctgcgccgcctgccaatataattcccttcatcttaaagttccccctgtctctttaattcctgcagataccgtcccagcgcgtcctgccaggttggaagcggtgtaaatccattttctttcagtttctttttttccagtctgctgttaaacggacgcgctgcctttgacagaccgtattccgcggttgtcacgggctgcacttcggtagaaatccctgcctgccggtaaatttcttttgtgaaatcgtaccaggagatgtagccaccttcgtttgttacgtggtaataaccatatttttcggtttccatcatgtcaacaagcagtctggccagatcgtaagtataggttggtgtgccgatctggtcatttaccacgcgcacctgcgggtgattttttgccacttttaacatggtcttaataaaattttttccgtttaatccaaacacccatgcgatacgcacgatgaaatacttcccgagtgtctgtgctactgccagttccccgccaagtttcgtctgtccgtatacgttaagcggtgcgtatgctttgcagtccggctcccacggagtctcgccctgtccgtcaaacacatagtctgtgctgatatagaccattttggcatctactttttttgccgcttccgcaatatgtttcgttccatctacgttgatggctctgacttttgcctgattttcttcgtcctctgctgcatccacagcggtccatgccgcacagtgcacgatggcatccggctgtacttgcatgattgtctgttccactgctgccgcatcggtgatgtccagcggcacatacgatgcacaggattccagtgtcggtgcaatatccgaaccgactgcctgatgtccgcgctttgtcagttcgtttaccacgtcatgtcccagctgtccggcaacgcctgtcacgaatactttcatatttataaacctttctttccgtacatttctttgtaataattctggtattccccgtttacgatgttctcccaccattccttatgatccagataccactggatggtcaggcggataccatctttaaacattgtctccggcagccagcccagctcgttgtggatcttggtcggatcaatcgcatagcgcatatcgtgtccttttctgtcctgcacatgctcgatcaggctctccggcttgccaagatattcacaaatcagttttacgatatcaatatttttcatctcattgtgtccgccgatgttgtagacttctccgacggttcctttgcgcaggatcaagtcaatcgccttacagtgatcctcgacatacagccagtcgcgcacattgagtccctctccgtataccggaagcggcttatctgccagcgcatttgcgatcataagcggaatgagtttttccgggaactgatacgggccgtagttgttggaacagcggctgatcgtcaccggcaggccgtacgttctgtgatatgccataacaagcagatccgcagatgccttggaagtgctgtaaggactggaggtgtggatcggcgtatcttcatgaaagaacagatccgggcgatccagcggcagatctccgtacacctcatccgtggatacctgatgataccgtgaaatgccatactttctgcatgcgtccatcagcacagacgtaccgataatattggtctgcaaaaagacttccggattctcaatggaacggtccacatgggactccgctgcaaaattcacgatcacatccggtttttcttcctcaaaaagtttgtatacgcccggtcgatcgcagatatccaatttgacaaaacggaaatttggctgctccatcaccggtgcgagcgtggacaaatttcccgcataggtcagggaatccagacaaacaatgcgatcctgcggatgttcctttaacatatagaaaataaagttgctgccgatgaaaccggcaccgcctgttacaataatggtcatgagtgtttcctcctgtgtgcgtttacgattcctgtatttgtttccattataaaaggtgacgctaggtcaccttcaagtcttttttatagatttttctaattattttctgcacaggaagattccggcatcttttgtgatatgaaatccatctgccacgcgggcagaaacaaattcccgaaactctttgtactggttcaaaagcagctggttctggtttccgtgacaggaaagaatataggaaatcagcggttccgcttctgctatttcaatcgcatcctcgtatcttcgcatctgaatttccgggaaatacggtgctaacaggttttctccgttttcaagcccgaaccgctcatacagcacctccgctgataaaacgatttctttatggaactgctgcaccagatcggtaatttcccacatatgctgctttccgtaggtactgcatagaaaccgtcccccattttttaagactctccgacattctgcaagcacctgtgggatatcttcacagtaaaacagcacatgatccgcgatcacaagatcaaatatttcctcctcgtaaggaattttttcgcagtcaaattttttataggaaaagcggctgtcctctcccagtgcacgccgggcatcctttagcattccttctgatttgtccgagagaacgacccatagatccgcaggcagctgttctctgttttcggtccatagtgctccatttccacagccgagctccagaatccgcatccccggctgcagattacactgctgcataatccacggaaaccacccctgcggattgatggaatactccctgtgcaggcgaatccgggcggaaatatttgccgcattctggtactggtttttcaggcttcgttccactgccgtcagatggatcagatccagcatactgttccagtcaatcgcctgttccgtctggatggcttctatggtgcggtcaattgcctcatccatcgcctgcatttcgtccattttctgccgcagcagcttcttctgtatccgcatggattcaagaagatactgctgatctgccgaggcaagtgtcatctcccggatatcttccagcgaaaatcccagatattttaataaaaggatctgctggagttttgccagatctgcatccgtatacagccgcgctcctgcggcagtccgtgcacttggttttaaaatattctgtttatcataataccggatcgcgcgaagtgtcacatgtgctttttttgcaaattgtccggatgtgtaatacgcatcctttttcatctacagttctttcacctcatctcgcatttcttctgtcatattctgtacataggtcgtctgggaagaaatttcttccgtatttgcggcaatggttgacaccttctgcgtcatggtattcatgctttctaccagatctttgattgaatccatgctctgtgtaatctttggaagaattgcctcggctttctggtcgttctgtgtcagaagatccttcgtggaatcagacagtgtacggatttcctccgctactactgcaaagcctcttccgttctcgccggcacgcgccgcctcaatggaggcattgagcgaaagcagatttgtctgtcctgcaatggcagaaatatcttcattgctctttttatatacactgatgaaatccgacataatgcggatggattcattcagttcatcgcacaggcgggaaatatcctgaatatactgtgccagattggttgcttcatttgcagattcctcgtttgccgtgttcagttctgcaatattgtcacttaaggcaataaaccgttctgtgatcgcagcaatcttctgctgtcggatttcctgtgcattccgttcctgatcacggatttctgcaatcttttttgcctcttcctctgccagaccccgcacatagtgcacacagttttcttttacgttgactccattgtggatggcacgtaccatgttggtgcagcttgaatatccacaggattcacagtccctgtgctgttcctcgtaagtatcttttttcatttctgtaaacaggcggttcttctcctgttcggacggttcctcaatatgtactgcgcgattggtgtagctgcgcataaaatcgttgatgtccagctttccaaaagcgtccatgaagtttttcagacgttcctccggtgtcagtgtatctgcccacggactcctgcttttgctcttcctgccaaagtgtgccttctcctgtttttcactggttttgctgttccgcagttttgcgattgtcagcatgacatcatccgttccccgtttaggatctgtggcagttccgtagagacagcccttcgcacaatttaagatatctaccataaacggaagttctttattctgctgaatacgttttgcataggaacgcagatattcatatgcctcatgctcgccctctacctgacgcactacctgttcttttccaagaaaatgttctacattctcccgcagtccaccaggcatcggatacaaagaacccagtccgtattccagttcatcggtatatggttcacacccttcataatcgtttccgatatacttcatcatcttttcaaaagttacattataagaaacatatccgccgcaattgggatcggtaatctctaattttttggcaatacacgggctgatgaaagcaatttcatctgtgacctgcatgtactttttcatataaatagcagtacacatcatcgggctgtgtaccggcatcagccgcggaatcagctccggtatatatttttccacataggtgactactgccggacacggctgggaaatgcccccgaaaaatttgtgttccgtaatgtatttcagatatccccaggttgtgatatccgcaccgaacgatacactgcagatatggctgactcccttactctttaaatatcccagcacacgctggtattctttgggataattcgccagaaatgccggtgccagtatcacggaaattttctttcccgatgcaaggtcttcaaagaaacggtccgtatcatcataatagtctctcgcttcatgtgggcagacatcaaaacattccccgcatacaatacatttgtccgggtctaccgttacataaccttcctgtgttgcaatatttgccgtaagtacaggacagctgcgcacgcatttgttgcatccggtgcataaatcagttgtgtaaatcagttccat

SEQ ID NO: 149 - DNA, 7434 bp, unidentified
  source 1..7434: mol_type = unassigned DNA
atgtctctttccgaagaagcaatcactcttcagcgtgctgcgcacgaactgatgtatttgggtatggacggcagtcccgtctatagcgatgacttgtcacggcggaacggtgaggtctaccgtcttaccatggctttataccggtcgggtgtaaaaggcactaccatcgaagagcaggcaaatgtctgtcttgcccttcttatgggttacagcgcctcttttgtggaccatggcgaaaagcagcagcatgtccaggaagtgctggactgttgttgggatgtgctcgacgcccttcccgcttccttactgaagctccgtctgcttaccgcctgctacggtgaagtgttcgacgagtctttggccgacgaaggccgttccatcatcgcctcctgggattccttatcacttactcccgaacagcaggaagcggttgatgaatttcagaatgtgacagacaatccctatccatgggaatatatcgatgaataaaacttttcatataatgcttaacaataaatccgtattgattaccggaggaacgggttccttcggaaagaagtttgtggaaaccattctccgtgattatccgcaagtaaagaaaattattatttactcccgcgatgagctgaagcaatttgagctgaaacagaaatatcccggtcataagtatccgcaactacgtttctttatcggtgatgtccgtgacctcgaacgcctgacgcgggcttgcgaaggagtggacgtgattatccatgcagccgccatcaagcaggtggataccgctgaatacaatcccgaagagtgcatcaaaaccaatgtacacggtgcgcagaatgtgataaaggctgctcttgccaccggtgtacagcatgtggtggccctttctactgacaaggcttgtgcccccattaatctttatggcgccaccaagctcacttccgacaagctgtttactgccgccaacaatatcagcggttccaaggacatcaggttctccgtagtccgttatggcaatgtgatgggttcccgcggttccgtaatccctttctttatcaacaagcgtgacaacggggcgaaggaacttcccataaccgatatgcgcatgacccgtttcaacatttcactggaagccggtgtcgctttggtcatgtatgccatcggacatcacctgggtggtgaaatctttattcctaagattccttcctatcatatccaggacgtggctaccgccattgcacccaatctgccgcaggtggaagtgggcatccgtccgggagagaaactgcacgaggagatgattactgtaaccgatgctcttgatacaatcgatttgggcagatattatgtcattcttccttccgtatctttcaagcacagtcgcgaagagttcatcagacatcacaatgcagtacccgttcccgacggtttccactacagcagtgacaacaatacggagtgggagacagtagagactatgcgcgagaatatcaagaaatacgttgaccctaatttcgaggtgaaatgataagcaagcctattccatacggtcgtcagcatatcacagatgaggacatccgggcagtcatcgataccctgaaaagcgattacctgacacaaggtcccaaaatcagggaatttgaaacgaaatttgccgaatatgtaggtgcacaatatgccgtagcggtgaacaatgctacttcggggcttcatcttgcagctaccgcactgaatgtaaagccgggtgacaaggtgattgtcactcccatgacctttgctgccagtgccaactgcattcgctattgtggcggcgaggtggtattctgtgatattgacaaggatacttacctcatggatatccgtaaactcgaagccatgcttaaagcttctcctcgcggtacttacaaaggtattgttccggttgattttgcaggctatcctttggatctggaagagttcagaaagcttgccgacgagtacggtttgtggattatcgaggatgcctgccatgctcccggcggctatttcatggacagtaaaggcaagaaacaacattgtggtaacggttgttttgccgactgtgccgtattctctttccatcccgtgaaacatatcgctacgggtgagggaggcatggtgaccaccaacagcaaggagctctatgacaagctttgtctttaccgtacgcatggcattacgaaagaccctgccttattgcacgagcatcatggtggctggtattacgagatgcaggagttagggtataattaccgtctgactgattttcaggctgccttgggtatttctcagctggagcgtgcgaaagcaggtcttgaacgtcgtcatgaaatcgtaagacgctataatgaagcgttttccggaatagatggtatcaagactccgttcaatactgccgatgtctatcatgcttatcacctttatatcattcaagtagctgaccgcttgggtctttataattatctgcacgagaacaatgtctatgcgcaggttcattatgctccgcttcatctgatgccttactatcagcagtggggcaataggaaaggcgatttacctatagtagaagagtattacgaacattgtctgagtcttccgatgtatcccacgctgacggacgaggaacaggagtatgtgattgaaaaggttatagaatttgtagcgaaatgaaaaatatagcaatcattcctgcacgtggcggcagtaaacgtattccgcgtaagaatatcaagccctttatgggtaaacctatcattgcatattccatagaggcagctttacaaagcggtctttttgaggaggtgatggtttctaccgatgatgaggagattgccggaatagcttgtaagtatggtgccaaagttccttttatgcggagtgccgagatgtcaaatgaatatgccggtactgatgatgtaattcttgaagtactgaggaagtataaagagcaaggcagggagtttgaaacggtttgttgcatttactcaacggctccttttgtcactcccgaaagactccgggaagcatacggaaaaatgaattcggagatagattccgttttcacttgtgtggcttattcctatcctatacagcgcagccttcacatcgtggatggaaaaattagtatggtttatcccgaatacaaaaatgcacgttcccaagatttagaaccgatttatcacgatgccggtcagttctatttctctcgcactgctccctttgtggagagccggactttttggggtgagaatacagccgggttggtactttccgaacttgaagtgcaggaccttgatacacagactgactgggcattggcagagatgaagtatgagttgcttcataaatgatgtaatgcagaaaatctatctccgtgccgatgcaagtgctgccatcggctacggtcactttattcgtactctggctttggccgatatgctgaaggacgattttgattgtaccttctttacttgccatcctaccccttatcaggtgagtgagatggagaaggtatgtcctttcatccccttacaggaagaatcacattatgatgagttcctttcccttttgcaaggtgacgaaattgtggtacttgacaactatttctttactactgattaccagcgtgccatcaagcaaaaaggttgctgtctggtgtgtgtggatgatatgcacgacaagcactatgtggctgatcttatagtcaatcagggattgggttacacgcgtgatgactattcgtgtgaaccatatactcaatttgcctttgggcttcaattttcattgttgaggaggcctttcttcaatgttgcgctgcagaataaacggaacaattattcaggaggtttatatgtattggtggcttttggtggttctgatttcttgaatttgacgtatcagaccattcatgcaattaaagccaaagacaatgtgaagaagataacggcaattgtcggtgattcgtatgcagccgagaatatggttgatgaccccaaagtaacctatcagaagaatttgtctgccggttccattgcagacttgtttagtactgtagatgtcgccatattgcctgcctctacgatgatgaatgaggcattggcctgtggaactcctgttataggagggtattatgttgataatcaggagcacgactattatatgtttttgcgtgaagggctgattcagggggcgggtgattataccgatgccgctgcctttactcttgttgctgagaatttggataagatggccattcgtaaaagacatgccatcactccggatattcccaaacggtttgtcaatttgtttaaaagtctgttgatatgcaagtaacttcacaaagagcttcggccatattgtataattatctgtctggcaaccattttgataaaccgttcttattgccggcaaatgtgtgtcctgtagtgcccctgtcgtttatgaaagcaggtgtcggttttgagtttatagacatagatgaaagccatgccatgtcaaccgagaaatgtttgacagctatagaggcgggaaaatattccggtcttgtatttgtgcatgcctacgggaaaaagtatgacaacaaagaattttaccgggcagtgaaaagtctcgatccaaatctttgtatcattgatgattgttgcttgtgcattcccgaattggcagattccttgcctgaaaatgtggatctctgcctttacagtaccggatatgccaaattcatagaactttcctatggtggctatgcaagttttagggggggggtacgaagttgttgattatcagtatgatagcattagtgaacaaaagcattcggtatatataaggaaatgtctcctggagaatgtcagatatatgcttccggctgactatccttggctggacgcctcaaatttacaaatgaccgatgaggaatattttgacatcattgaaagaaagctcccaaaagtgattgcggaaaaagagaaaataaacaagatatacaggaatctgcttcctgaatcgattcagatgggagatgatttccagaactggaggttcatgattgtcatcgagaaccggcagaaggttcttgacgcaatattcaaggccggtctgtttgccgggactaatttcccttcggtttcatacatgttcaaaggtgtttcttctcctgttgcggaagtggaggcgaagcatatcgtcaatttgtttaatgatttccggttcagtgaagcacaggcaagaaagatctgtgatgtgataaattcggttatatgaataaaagattattgatactgggcgcaggtgaaatgcaggttcctgtcatccgaaaggcgaacgatatgggattgcataccatagtcgcagatatggatgcgaatgctccgggaatggggtacgcctcggaaccggttcttgtcagcacgatggataaggaaggtgttttggaatgtgccaaacgtcactctgttgacggcatacttactacaagtgacgcgcctgtaaatgtggtttcctatgtcggggaacagctggggcttccgtccatgtccactgaggtcgcaaaaatctgtacaaacaaatacttgcagagggaaatgtttgcggccaacgggattgatgtaccatttttcatgctttgtgataaagatacggacttgggcacattgcaagattatccatatattgtcaaaccggtagattcctctgcaagccgcggagtaaaaaaggttacaaatcataaagaacttgtacttgctttttccgaagctctcggttattcccgtaccggaaaggccattgtcgagggctttataacaggccgtgaattcagtgttgaaacatatacgcaaaacaataaaactaccgttgtcactattacggagaaactttgtatcggtgaggcagaaggcttctttgttgaagatacgcacattgaaccggcgcgtataacgaaacaggagtgggagctggtttcggagaccgtatcaaaagcactttgcctgattggacttaataattgcccctcgcatacagaaataaagctgaatgaatcgggcgcttatatcatagaaattgcttgtcggcttggaggagattatataacctctgatttggttccattgtcaaccgggatagatatgctgagaaatctggtgaactgttctcttggtttgcccgttgatgtccttcgcaaacatgaaaaatgctcagcggtacagttccttaatccgctcaactatcagcgttgtgtggattttctaagctcttcccggtcatcggctgtttttcggtctgaaataagaccttattctgaaaaaaaaataaaaaactctttagaccgtttagggtatatcatacttcagactgatagtatggaagagcttgaaagtattctaaggacgattaaatagtaaagacatgagagataagtgtatgattgtggctgagatgtctgccaaccataacggtaagaaagaaacagccattgaaaccgtcagggctgcaaaacgtgccggagccgatgccgtcaagttgcagacctatcgggctgataccattacgcttcgctgtgacaagcctgattttataattaatgaaggctctatatgggacgggcaatatttttatgatttgtatgaacaggcttatactccttgggagtggcatgaagagttgttccatgtggccaaggaagaaggactgatctgtttttcttctccttttgataagacagccgtcgatatgcttgaggctttggactgtcccgtttataagatagcttctttcgaaattacggatattccattgatagaatacgcggcttcgaagcataagccgatggtacttgctacaggcatagccaccgaagaagatattcaattggctgttgaagcttgccgcagaatgggaaataatgatattacggttcttaagtgtacctcttcttatccggctccagttgaggaagccaatctttgtatgattcgtgatttggcagaacgtttccaggtaaaaagtggactttccgaccataccctggggagtgtctctcccattgtggcggttactcaaggtgcgagtatgatagaaaagcactttattttgaatcgttccatcggtggtccggattgttctttttctatggaagagaaagattttgcccaaatggtaaaagatgtgcgcatggctgagttatctttggggaaaacgacttacgaattgacggagaaaatgagaggtagccgttccgcatcacgttctctctatgtggccgaggatatgaaggccggagaagtgattacggagcggaacgttcgctccgtccgtccgggcttcggcctgcaccccaaatatctgaaagatatattgggaaagaacgtgaaccgggatttggagaaagggacgaggtttgcattggagtacgtgaatggttag

SEQ ID NO: 150 - DNA, 6122 bp, unidentified
  source 1..6122: mol_type = unassigned DNA
ccgctgatccttgccggtgtcgccgccgtaggtaaagcgcttggctacggtctgaaaggttgctgccagactatcgccgaagttgccggtgaacacgctgggctcggtggaggaattgaaggtatactcgcccggttcggcgcacacctccaccacgcggccctgctccacgatgagcatgcactgtccgtctgccacggcgatgccgctgccgttggtgatgatgttgtcctcgccgttgttggagctgcggcgggaggtgcgcttctggcccttgaccatcagcacatccttgtccagagaatcgcagtagaaaaattccttccactggtctgcaagagttccgcccagtgcgcccatacctgctttgatcaaacccataataatttcctcctgtatgttttattgtttttgctctcttctttatcatgcagaacgatttcgtttgtaaaaaaggttctgcctgctcaggggtaagggtcagataattgatattataatcatactgcaatgcggcgctgaacgcaaggaatttctaaccgttgccacctgcctttgcagcttctttcacaaaaaagaacaccggagcgtccatagagactccggtgttccgaaataatatttttatgcttgtcccgtacccaaaaaaggcttagaaccgccgccatgtatccggcataaacagcaccagcatggggaagatctccagacgtccggccagcatatcgaagatgagcaccagctttgcggggtctgcaaagcagccgaagttctgcattgggcctgccatttccaagcccgggccgatgttgttcagggtagcagccacggcggtaaagttcgtcaccatatcaaagccgttcaggctgatgaggaagaaggaggccgcaaagataaagatataggccgcaatgaacacgttggtggtgcggatggtctcgtggttcagcagcttgccgtccatgcgggcgggcgctaccacctgcgggtgcagggcggtcttgagctccttggccagggtcttacccagaatgaggaaacggctcaccttgatgccgccgccggtactgccggcgcaggcgccaatgaacatgagcatgaccagaatctctttcgagagggtcggccacaggtcaaaatcgcagctggaaaagccggtggtggtgatgatggagcccacctgaaaagcggcctgccgcagcgcctcgccaaagctgttgtacatactataaatattcgcagtgatgatacccactgccacgacgatgaccacaaagtagccccgcacctcctcgctggcagcagcgcggcggaacttgcgcatgagcagcaggaagtaggcgttgaagttgacgccgaacaggatcatgaaaatggtcacgacccactggatgtagggcgaaaagctggcaaagctgtcgttgcggaagccgaagccgccggtacccgccgtaccaaaggcagtgagcatggcttcgaacaggggcattcggccaatcagcaggaacaccagctccagcacggtaagggcaaagtagatgccgtacaggatcttagcggtggactgcaccttaggcacaagcttgtccacctgcgggccggggctttcggctttcatcaggttgacgtgagagccgccagtcagcggcagcagcgagagcagaaacaccagaacacccatgccgccaatccagtgggtgaagctgcgccagaacagaatgccgttgggcagcccctccacggcgggcaggatgctggcaccggtggtggtaaagccggagaccgtctcaaacagggcatccacggggttcgggatgcagccggtgagcacaaagggcaccgcgcccatcaccgagatgaacacccagcacagcgaggtagccgcaaagccttcgcgcatatagaacaccttactgcggggtttgatggtgtgcagggcgtagccgatgccagcgctgacggcagctgtgagcagaaacacgcccagcaccatccactcgccatacactaagctggcggcggctggcagcagcaacaacgcgccctcgatcatcagcacatagcccagcagacggaaaacgatcgcatagttcatagtccgcctccgtcagtgctccacgatatcgcgcagatcgtgcagaccgtgctccagcgtaaccacgatgacgttatcgcccacttggatttggtcgccgccgcggggaatcaggatcttgctgccgcgggtaatacagcacagcagcaggttctttttcaggtgcagctggctcaggggcacaccggtagcggcgctctcctcgtgcactgtaaactccagcgcctccacgcggtcatccagtatgcggtacagagtcttgatgttgttgcctgcctcgttttgcagggcgcggacgtactgcacgatgtagtcacaggtcatgtacttggggtagaccacgctgcccagatccagcccggccagaatatcgtcaaattccagacggttgaccttggtcaccagcttgccattggagtgctttttggcaaacagggtcagcagcacgttctcctcgtcgatgttggtcagcgccacaaaggcttcggtggattccagaccctcggaaagcagaaactcgcggttggagccgtcctcgttcaggatctgtgcgccgggcagctgctcggccagttctacgcagcgggcggcatcccgctccacgatacgcacccgcacatggttttccagcagttcctgactgaggtagtaggcaatggcaccgccgcccacgatgagggcgttgcgtaccggctgcaccggcagatgcagctgctggaagaaggcatgggccttttcctgcgtagcaaggaaggtgacctgatcgcccttttgcagcacaaagttaccgttggggatgatgaccccgccctcacgctccaccgcgcacaccagaatatcgctcttgagccgggtggggatctctcgaatggctacgccgtccagtgcatcgggcagcgcaaacttgatcagccgcacacggccgtccgcaaaggtatcgatcttgctggcaccggggaaacgcagcagatgagagatctcctttgccgctgccatttccgggttgatgatggcggaaatgccgatctgctttttgataaagtccagctcgtggctgtaggatgggttgcgcacgcgggcaatgccgtggcagtggcccgcctttttggcaaacatgcagcaaagcaggttcagttcgtccgagccggtgaccgcaatgaacacgtccgcatcctcaatgcccgcctcagacagggtggtgatggacgagccattgcctacaatgcccagcacgtcgtagctttcggtcaggtgctccacgcgcgctttgttggtgtccaccacagtcacgttgtggccttcctcgctgagctggcgcgccagagccgtgccgaccttgccgccgcccaccagaatgatcttcataacaagtcctttctcctttggcagccccttttcccggggcatacaagtacagtgtagtataccatatcccgatgcaaagttctaccgtttgtcccgcaaatacagcgaattgcttaaaaagcgacagttcttttgtgcaagatggcctgttctcagcgtgaaagcgcaaaaagggactgccacacagctttgtgcagcagtccccttgggacgaaacgatttagaatgcccaccgcgtacgctttgggcatcctcagcggaaaaaaaaattgttataagagcaatgccgggccgcctgcgggctgcccggcattgcattttcacggaaaaacaggtttttcccctgctgtccggtctcagtaccgctctacgccgtccttggtgacaagggcgtacaccagcggagcttcctccggcttttcagcgccgtacacaaggccgctgcggtactcggctgcggcagcttcaaacttgtccgcagcgccgtagaaggtggcaaggctttcgcccttatggacgtagtcaccgcgctttttgtgcagggtgatgccggcggcaaagtccagcgggtcgccctttttctggcggcctgcgcccagcagcacactggcagaaccgatcttttcggcatcgttggccgtgatgtagccgtcctgctcggccagcagctcgtagctggcggcgggctgtgcaaacaggctgtaatcgtccagtacccggatgtcgccgccctgtgcggcaaacatttccttgcacttggcaaaggcagagccgtccgcaatgacagcctcggccatagcgcggcagtgggcggcatcgcccttgcctgccagcaccagcatattggccgccaattgcaggcacacctcggtcaggtctgccgggccgtggcccttgagcacgtccatgctctccatcacttccagactgttgccgatgttgtggcccagcggggtgtccatatcggtgatcatggcagctacccggcggccgtggtgggtaccgatggcaaccatcagctgcgccagctcaatgctctggtcaacagttttcataaaagcaccggtgccggtggtgacgtccagcaggatggcgtccgagccggaggccagctttttggacatgatgctggaggcgatcagcgggatgcagctgacggtagcggtaacgtcccgcagggcgtacatctttttatccgccacagcgataccctcgctctggccgatgaccgacagaccgatctggttcacctgtgcaaaaaactcctcctgcgagagggcggtctttgtgccgggcacgctctccatcttgtcgatggtaccgccggtgtggccgagaccccggccgctcattttagcgatcttcaccccgcaggccgccacgatgggtgcaatgaccagcgtggtcttatcacccacgccgccggtggagtgcttgtccaccttgatgcccggaatgggcgaaaggtctaccatcacaccgctgtgcgccatcacatcagtcagttcggcggtctcctcattggtcatgccgcgcagatacaccgccatcatccatgcagccatctgatagtcggccacttccccgctgacaaagccgttgacaatagcttccagctcttcccgggtgtgggtgccgccatcccgcttttttgcgatcagatcataaatacgcatcgtttcacgctcctgttcttactgtttttgggggcgttttatgcccggatttcctgccatacgctcttgccgtccagcgtggaggcgtccacttccagatattcgcagatggtctgggcgatggtgccgaagcacagcttggtgcccagatccatacccgcctttacgcccttgccgcagaccagatacggcacatactcgcgggtatggtcggtggtcttggtgtaagaggggtcacagccgtggtcggcagtgatcatgagcaggtcaccctcccgcatacccggcaggaaatcggccagaaaacggtcgaactcggtggcggcggcagcgtagcctgccacgtcgcggcggtggccgtaaagcatatcaaagtccaccaagttcacaaacgccagaccctcaaaatcccgggtctgcaaggccttggtaaaggcaatgccgttggtgttgccggtggtcttgatcttttcggtcacgccctcgccgtcaaagatatcgtagatcttgcccacagcgatcacgtccttacctgcgtctttcagcagatccagcatggtggcgcggggcggcttcaggctcaggtcgtggcggttggtggtgcgataaaaggtgtcggcgctgttgccaaggaaggggcgggcgatcacacgacccacgccgtacttgcccttgagcatttcccgggcgatctcacagtagcggtacagctcgtgcaccggaacaagctcctcgttggcggccacctgaaaaacgctgtcggcgctggtgtagacgatgagggcgttttcccgcatggcctgctcgccgtagtccttcagtacctgcgtgccggaatagggcttgttgcacagtaccttgtggccggtcttttgctcatactcccggatcagctcctctgggaagccctcggggaaggtgggcagcggctccgggctgactacaccggcgatctcccagtggccgatggtggtatccttgcccat

SEQ ID NO: 151 - DNA, 8913 bp, unidentified
  source 1..8913: mol_type = unassigned DNA
tcaaagctcctgcggcatctgccatgcttcgatatcggtatgcagcagatggtgagaacgttcggacagcggctttccgagatactctttgtaaagcgcctgcacatcggggttttcatgcgagaaacgaaggagcatcttgtgatcaagtctccacaggacatttccgcgcgcctcggcgcactcctcgccgtcgtgaatcggctggccgccgcctgcgcagccgccggggcaggccatgacctcaacgaagtcatactgcacgtggccggaggcaatcgcctccatgagcttcctggtgttgccgagtccactgaccaccgccgtgcggaccgtgcctgcaccgggaacgtcgaaattcgcttccttccagccctgcatgccgcgcacagcggtaaaggcatcggggtccggattttcaccggtcacaagatagtacgcgctgcgaagcgccgcgtccatgacgccgccggtcgcgccgaagatcaccgccgcgcccgtaccggagccgagcggcgaatcgaagctgccctcctccaaggccgccgggtcgatcatcgagcagcggagcatccgcacgagctcgcgcgtggtgatgaccacgtcgacatccgcgtcgccgcaggcatctttcatcgtgggaagcgccgcctccgcctttttggacgtgcacggcatgacagagatgacacggagatttttgggatcgatgccgattttttcggcaaaatagctcttagccaccgcaccgaacatctgctgcggcgatttcgcggtagagaggttctttgcaaactgcggaaactgcccctttacgaaccgcacccagccgggacagcaggaggtaaacatcggccaggaatatgcatccttatgcgtaaagcgctcgatgaactcgctgccctcttccatgatggtgaggtcggcgctgaaattggtgtcgaatacataatcaaagcccagctcccgcagcgcggaggccagaacgcccggcgcagcctgttcgggtgagagaccaaaatattctgtccacgccgcgcggacggcaggtgcaacctgtacaacggtcgtgagggtgggatcggcgagcatgcggtagacgtggtcggtatcgtcgcgttcctccaatgcaccgaccggacagtgggtcacacactggccgcaataggtgcagagggactgggaaaggctgtccgcctttgccgtaccgacggtcgtccgggagccggtgccgaccagatcccagatatgcacgccctgcaccttatcgcacacctgcacgcagcgcatgcacttgacgcagcggttttcaaagcgcaaaatgggcgcggagtagtcgaccggcgccggacgcagctttttctgatagggcgcgccgagcagattatagtcgttggcgagcttctgcagcttgcagttgccgctgcgcgtacacttgacgcagtttacctcgtgctggctgagaagaagctggagattcacgcgccgcgtcatgcgcaccttctgagaattcgtgtggacgaccataccctcgtgaacctcattgtcgcacgcggcaacaagcgtatcctgtccctcgacctcgaccatgcagatgcggcaggcgccgatctcgttgaggtccttgagatagcagagcgttggaatgtcaatattggccgcgcgtgccgcttccagaatgctggtcccctccggcacgcagacgggtttgccgttaatgatcaagcttaccatcgttcgatcctccctcccttgaagatgccgtagccgaagtggtcgcagcgcaggcagcggccgctttccgcgcaggcctcctcatgcgtcatgccgcattcgatgtcttcaaaatcgcatttacgctgggctgcctcgcgctctttggtgttgacgcgcccgcgcgcgggacagacgtccagatgcggcgctggaatttccacatcggtgcgaatttcatggtggaagccgagctgttcatcgatgttggctgccgcgaccttgcccgccgcaattgcacggatggcggtagcagggccggtcacgcagtcgccgccggcaaagacgttttccatgttgtcgatctggctggagctttcagccataaacgttccccttttgatggggataccggcctgctcaaagcccgcgatctccacgccctgcccgatggcgacgacgatgatgtcagccggaatgcgttcttcgggctggtctgccgcgtccgggcggggtctgccggacttgtcggcaaggccgatgatctgcggctgcacccagagggcggcagcctcgcccgcttcgtttgcctcgatgcgcaccggcgcagaaagctcgcggatctccgcaccctcggcaattgcgccctgcacctcgtcgggaagcgcagtcatgtccgcaattctgcggcgatagacgcaggtgacgctggcagcgcccagacgcacggagcttcttgtcacgtccatcgccacgttgccgccgccgatgaccacgacgcgcttgctggcgaagtccggcatgatgtcgtcgccgatggcgcgcagcatttcgacggcagacatgacgtttttgctgtcctcgccgggaatgccggttttcttgtccgtatgcgcgccgatggcgacatacaggcagtcgtaatccttgtgcagctgttcaaaggagatgtcttttccgaccgtcacttcggtatgtacctccacgccggtggacagaatggaggcaatttccgcgtccagcttttcgcgcgggaagcggtaggccgggatgccgtagcggagcataccgccgagccgcttcttttcttcaaaaatcgtcacgctgtggcccataaggcgcagataatacgcgcaggaaagcccgctcgggccgccgccgatgatggcgacgcgtttgccggtcgcctccccgcaggcaggattcgggacattgcccgcatgatcgactgcatagcgcttgaggccccggatattgatgggcgcgtcgaccatgttgcggcggcagcgcgcctcgcacgggtgctcgcagatgtacgcgcaggcggtcggcatggggttatccttgcggatcaggcgcaccgcgtcggcgtaccgtccctcgcgcaccagcgcgacatagcccggcacgtcaacgcccgcaggacagagcgacacgcagggcacggggttctgaagcgaggcgaggcaccggtggtgctgcacatggttcacatagtcgtcccggaagccctcaaagccgctcaggaccagctgcgctgcgtcgcgtccgatggcgcagtcagcagaggcgacgatggcccgcgccgttttttcgatggtgtcgatggtcagcatggtgcccgttccgtcgagcacctgccccatcagcgcggcaagctggccgagtccaatgcggcagggcacgcatttgccgcacgactgcgcgtggcacagctgcaaaaatgtcagcgacatatcgatcggacacaggcccggaggactggacgcgatcctgcgttccatgtccttgtagaggcggtcgacgaccgtctgggccttgcttgcggttttgatatccaatctgctcaaggctggctcactccttctgcttttctgatctttttattctattttttgatataaatagcattttttaatccaaaagaatcatagcatatccaccggataccggtcaatacttatcgataaattcttatcaaaccgttcattcttcttttgcggaccgtctattcgtaatttgatatgtcccatttcaaaagccggaggcagccctaatacgcgccggagcagcggcgttgttttgcgccgctgctcgttttgtttattcagcctgtacgttttgctcggtatagatctttgtgtcatccttatgaactgtgttcagtttgggctccgccgtcttctgcccaggaataaaaatgggtcgagtgcgtatccgacgccagcggtgctgggtcgaggcggaagccggagatcccaagcgcctcttccgggcgaacccagggttttccctgtatggcgctcgtttcctcatgtgtcagaagcccccggtagatcgtcagtgcccgccggtaatagccgtcgcggatgcaggtctcctcctcgccgtcattcagcaggtgcaggatcagcggcagcatctgtgctgcgtaggcaacagacgcagagtgtgcgaccgcgcccggaatatttgcaacacagtaatgcacaatgccgtctacaatgtaccgcggatcttcatgcgtggtcgcgcggctggtctcgatcgcgcccggctcgtcgttggaaatatccacgatcactgagcccttttccatgagggaaagcatgtttcgggtgatgaggaactctttgttctccttctgccatttgacacagttgagaacgatatccgttttcggcaattcctccgcaatatgcgcccgtgagcagcgcctaacgcggacgcggccattatactgtgctgagagcgcacggagcctgtgcatatttctggccatgaccgtacagttggcgccgagcgcctgtaagacctgcagagcgcctctgccgacttttccgcttccgagaatcagcgcatggatgcccggctcccccgcaaagccgccgacatattttccctttccgccgtggatggtcagcagcgattccagcccgaacagcgccccctgcttccccgctgcctcacagttcggggagccatatcgatgggaatcctccgccgtaaatgcaatgcagccgcttttcatcagcgcgtcgacctcctccggatttgccgccggatgcaggcagccgagaagcagctgccctgtccggatcagcggccattcctccggcgtaaactccttgaccttggcgaccatatcgcatactttgaacagctcctgcacagagtctgtcagaagcgcccccgcagattcatacgcttcatccgaaaaaccggctcgttctccgcagccgcgctgtgcataaacggtgtgtcctgcgctcgtgatggtctccacctctttcggcgtacagatcactcgattttcgcccttcttcgtctcacgcaaaattcccaaaatcatatgctgctcctcctttcatcaaattcttttcctgtcgtgctgtgtttttctatctttatcatacaagaaaagtgacggattcgcaacactaataatacaaagtctcattttaatttatgcatcaggccgtcgctcgcgtatcacaataaaaaagcgcaggatccgggcgattctccgctcaaatcctgcacctttcgggtttctgttccgtgcttacttttcgtgcccggccttctggcacgccggacaaacgccttcaaaaatcattctgtgccgcgtgatccgatacccggattccgctgcgatcgttttgtccggcgttgggtcgtatgaaaacggggcatcacagactgcgccgcagcccgtgcagatcaggtgatagtgaaagtctgtcctgccgtcataccgatccgctcccggaacctttacatgcgtgatctgcccctcctcagaaaggatattcagattccgataaaccgttccgcggctgattctcgggtcttttgcacggatctccagatagatctgatccgcgctcggatggtcatggtgttcctgtaccgcttccagaacaattttacgctgccgtgtgtttcggtactgcatcttgcttccgcctgccctcatatcattcaatttcatcgtctgccatgaaaaatccggactttccgcccttatccatgagcagatatatgaattgtaccgcaaaatatatcggctgtcaacattccagtaattgcggtttttggcagcagatttcctatcgttttcccctcttgtcaaacgaaactgaatcagatatacttaaaatagaggagagaaaccgaagttccggaacaaatcctgcaacggagcctctgttttcctgtctataaacagagcgacaaacgaaaggagattacactatgaaaaaggatcgccaacttgtaattctgcttgccgccctgctggttctgatttttttatccagctgtgccgcgggcaaaaacacgtccatgacccctgcggccactgattttgcctacgccgaggactattcctaaagcaaaaaaggctgccgccgaggctgctgcaaaggagcaggaaccatgatcaggcggagcaagactactgttttttataaatcgcttgctatcaggactcggtatctattataatataaccaccacaggaaacccatatgaaagcagctttgccccgcctgcacccgccgccattccgacgtgaatatgcaaggaggtattgtctatgagtacacaagccatccgttccagagagaatcctaatctcgaactcattgcattccatggtcattttgcaacccggcattcccataacagtcattaccttgacatcacacggctgaagcacgaatacagtctggcgcacgacactgcgcttgcgctcgcgaaccattacatctacgaaaagtcgatcgacaccatcatctgcatggatggcagcgaggtcatcggcgcgttcctggcccgacagctgacgcagaaaattttgttctctgtcaacaataacaagagcatctgtgtcgtcacaccggaatacgactccaacggccagcttctgttccgcgaaaatctggttcccatgatccatggcagaaacatgcttttattgatctcgacagtcaattccggaaaaactgcgcggcgcgcccttgattgtatccaatattatggcggcaaaacgcagggcattgcggcggttttcagcgcgatcccagagctggacggcatcccggtattaagtctgttcacgcctgccgatatcccgggctatgaaacctatccaaccggcgagtgccggatgtgcaaagccgggcagcgaattgacgcactggcgaacagctatggtctttccaccttccgatgatccttcagacgggcagcgcacccggccttcgtgtccgggtgcgctgtttatatgatcagaaaacatcttttgcgaaaccgctgacgaaaccgtttgtcagcccttgtcggcggcaagggtctggtcaatgagtttctgcagcgtctccgcctgctttttttccgtgatggcgcctacgatggggtcacccacgatgttgccgttgcggtccaccacataggtggtgggataggcgaagatgttggttgtgaattttccggcctcgccgtcggaagcgaaatacacgttctgataggttgcgcccttcttggccagcacatccttcgcctccgagattgccgtttcgtcgccgtcaagcgtaaacgtattgacgccgatgagcgtgccgcccttctctgcgagctctttgttcagtgcgtccagctcggcaagctcacccacgcagggattgcaggtggtgaaccagaaattcaccacggtgacagcgttgccggagaacagctcatcgctcttcaccggattcccatccaagtctttgccctcaaatgcggggaacttctgcatgctgccgtcgtcgggcggattggtcatatcgctgcctgcgggcacgctcatatcgccgtccacggattcctgcatgatctcggggtacttgttttccagctcggtcagcttgttttcgatattgctgatctccgtggccgattccttcagcatcttatactcttcgtcggtgaactggtctttggctctctcgatggtatccagcaggaaatcaccatagtttttgccgtcctccaccatggccatgcccttgtcggcctccatgaaaaccttttcccagagcgcagtgttctgcgacaggatcgtgttctcctgttccatcagctttttgtgcagggcaagtgcctcctcggcgtttttcggctcgccggtcatggcagagctgtctccgctcatatctgccattttgtcgttgtcctttgtgccgcaggccgccaaagacagcaccagcagggccgccagcagcagcgcagtaaactttttaaacttcattttgattcctccgtattgatttttgttgtattttctttcccgttgccaaagccgcagcggaagcacacggcgtttgtgggacaggcgcggatgcacatcccgcagcggatgcattcgggatggtttggcgtcttcgtcacgtccacgtccatcttgcaggctttggcgcattttccgcaggagacgcacttgttcttgtccaccttcatctggaacagcgagaccttgttaaaaagcgcatagaatgcgcccagcgggcacagccacttgcagaagggacggtagaacagcacgctcagtacgatcaccgccagcaggatgccgaatttccatgtaaacaggctgcccagtgccgcccggatgccggaattggcaagggacagcgggatagccccctccagcacgccctgggggcagaggtatttgcagaagaatgggtctcccatgcccacatcgttcacaaggaacgccggcagcaggaataccatcaccagcaaaacggcatatttcagatatcgcaggggcttgagctttcttgtggagagtttcttggtggggatcttgtgcagcagctcctgaaaccagccgaagggacagaggaagccgcagataaagcgtccaagcaggactcccagcagaataagaaaccccgtgatatagtaggaaaagctgaacttcgatgagcccaccactgcctgaaacgccccgatggggcaggccccggacgccgccgggcaggagtagcagttgagtcccggcacgcagacggtcttccccgcgccctgatacagtccgcccttgagaaagttcggcagatgcaggttggtcagcagcgtcgctcccgcctggatccagccccggaagcgggacatggtctgtgaaacgcctgaaaactttttacccaa

SEQ ID NO: 152 - DNA, 11630 bp, unidentified
  source 1..11630: mol_type = unassigned DNA
atgactctggcttctccggaaaatattttaaatgtaaccgaattatgccgtatagcaggggtttcccgttccggttattataactggttgaaaaatggtcagaagccaagtcaaaaagaatatcaggatcaggcagactttgctttaattcaggaagcatatgcatttcgaggctatgataaaggtgtaatgggaatttatatgcgccttctgcatatgggtatccgtatgaatcataaaaaaatccgacggctgatgcgaaagtatgggcttttctgtccgatacgaaaagcaaatccctatcgaagaatggcaaaagccatgcagacaaattctgtagcggataatcttttaaaacgggagtttaaactccacggcccaaggaaaatatttttaactgacattacatatatcccgtttaaggacagctttctgtatttgtctgttatcatggattcgtttacggatgaggtgctttcttatgtcctcagcgaaagcttagaagtagattttgttttacaaacagtaaaacagcttattgagaagcatggaatctctcctgattccgaagcactgatacatagtgaccagggatgccactacacaagtacatcttttcaagaggttatagcagatgcaggacttcgtcaatccatgtcaagacgcggaaactgctggaataatgctcctcaagaaagcttctttggtcatatgaaagaagaaatccatcttaaatcaaggagatgggcaactttttccgaagtaaaagaagccattgatgactggattgattattataataatgaccgatataaaatgggattaaagaacctgtctcccaaagaattttataactatatactaactggagagtatccgataaagatgcttcgttaaaattgggcatagaaagagctgactgtccttgacacgggtagtagtttagttcacgctgaggcggaagaagggcacagactagcttgatcctatctcctgtgcccacgttgaggcagaagaatgggcacaggcggaacttgtcctgcctacggcagccctacgttacgagtcatgcactcaattcataaatgtgtcgcaaaggacgctccacatttatttcattgacggctgtcgagtgtgtccgttggacgcacggtataaaaatagaacgaaataacctcttgtgtgagcaagctcccaccgaggtattccgttctatttttgcatggctcgtaactttcaatttacatcaataatacatcgctccctgtaaaaatccccaaaaataatacactccgcatacgaggtgccacaggtaagccatccactgtactgctacgacaatccttctcttccgggtgtcggcattcgctgtcgcgcggagcagtaccagcagcgctcccacaaatgcgaagaagattccgtacatgtagccccaagagaaattgaaatccacctcccggaatcctttttcatacaggaaaaatgccatgaggaagctcatcacatacacctgccaggagaaacggtagatgctgtccttgtgcagttccttgtagttcagcagaagtaccaggatcgggaatccgatggccagtccgatagccaggggcagattgccacaatactgcgcccatacatggccaaaagtaaatccgatgccgccttcctgtccctcctgcggtacgaacactccccggaactggtagagcagatccataaaagtcggaataaaacatactcccagccacaccgtggggacaaaattccggaatctgctgcggaacattctccacagcatcaaaatccccgcagctccgaccagcactatggtaaaactgggtttcgtcatggtcgccaacagcagatataatgcaaacagaatataatctctcttatgctctctgcccgcatttggctgctcatacaccggcagcaattcaccatacttaaaaaatgcaagaattgcaaacggccgtgccgccatataggtggcattgtggaatggattcggcgtaaataccccgagatatttgtatttgataccggggagataaatccctgtcggcggatacaccatcgacacaaaaaacagggataccgctacggttccagtgaggatccccggaagccaaggttttccgggcatagcttcctgtagctttgctcccacatgcttgtccagcatcaccttcagagcgatcattgctccgctgtttaacagcatcgtggccagtgccatagccagctccgctccgccagtaaaggaggcggtcaccagatggatcgtcgccgccagcttgaacaaaaccgggtaagggaagctgtaaccgctgtccagtccctgcatctccagaatatatgccttcatatcggaatgatacagtcccgttcccagcatgctttccacacactgccggtaaaacagccagaacgtaactgccgatgcgatggctaccagtgcagcaaacaccggaatttctatccaatttttcttattttctttcaaaataccgttccctgccactttctgattcattccgctatttcccatgatccggcacggctccacccattgccggatcttatttcagcttcgtgtaataagctaccacctttttcactgcatggatcacatcttccacatcgtcatccgtcaatccgtaatacagaggaatactcatcacctcgttgtaatacttctccgcattggggcacagtcccttctgatatcccagcttctcataataggaatgccagtagaccggcaggtaatgcacctgagggcaggtattttccgcatacagagcatcgaaaaactgccttctgtcgcagttcaggttctccagattcagatgcagcacatacagatgccaggtcgtgtcagactcagggatctccttctgcaggatcagttccggcattttgccgaacgcttcattataacgcttatggatttcttttctacgctgttcaaatgcagggagcttcttcagctggctcaatagcagtgccgcctggaaatccgtcatacgataattgaagcccagctctacctgctcgttgtaccacagcgcatcggtgggatgtaccatttcttccgggtccctcgtaatgccgtgggtacgcagccgcatcagatgacgatacagcttctcatcattagtcgtgatggcgccgccttctccgccggtcaccgtcttgaccggatggaagctgaagcaggtcatatctgccaggcttcccacaggctggcccttatatttcgtgccgatggcatgcgcggcatcctcgatcaggatcagatcgtgctccttacagatctcccggatctcatccagctccactgcctgaccggtgaaatctaccgcaacgatcgctttcgtcctgggtgtgatcagcttgcggatggacgccggatcgatattgtaggtctccggatcaatatctgcgaaaacaggcttcgcacccgcatataatacacagttggaggatgcagcaaaagtgatcgagcttacgataacctcgtctccctcaccgaatcccgccgccagcgccgccagatgtaaagcagcggtaccgttacataccgccactgcgtattttgcatgggtcagttcacacagatgctgctccagctccttcaccttaggtccgctggtaatcacatccgcagtcagcaccttggttactgcctctacatctgcctgatcaatatattgccgtccgtagaaaatcttcttctcacgtaccggttttcctccaaaaatggctaactgttccatattttcttcctcctgtaacatcttcatttcttttctatccgctgctatgatgcaaacatctgcaatttttagtctttttactcttttgccaaatctgaattttcaaaaggctgccactcgtcattcactgcttcatcttatcatattgccgggagaaaaacaacaatggtgttggcagcgccactcttgtgaagtataataaaactatctgaaatcagaaggatcaccggattcgccagatctgacagaaaggatgccctatcccatgaacaaacaaaccatacgtaaaaaatctccctggaaatttctgctttttgcccttgccgcgcttctgttggccggcattgtaaccagcggaattctttatttgaaaatatatgagcccaggaagcgttcctccgaccttggcagattacaacaggaatcctatcagggcatatttttgtccatgtccgcgccggaagctttccccgaagacatctatcccacctatatgggatatgacgcggtatgcggttcccaccggattgcatccttctccgacctgtccgattatctggaaacggccttctcctccggaaatgaggtatctcatgtcttcctcgtgctggatccgctctccctatggaacagcagcctgcacagcgatgcccgcttctctgcctccctggacgaagacctcctgtcctatgtggatacctacgccggcgccgaattcaccgtcattttctctgcgccttccctagaatactggcagtcacatgccaatggagatctggacacttactgcaatgtgttccgggtgctggcttcccctctgtccgccagagagaacgtgacactctgcttccccggccaggaagaatggctgatctcaaatccggatgcctatgacactcccacggaattaactgccgaagccgcccgttcagtaatgctgctggtgctgagcggctccctgcaataccggagcacagaaagcgataacagcttagatcatttttacacactggtacaggatgctgtaaattctccggctgactatcccgacctgtccgactacgagcttatatttttcggcgacagtgtcatgggaaattatcatgattttgcttccatccccggagtcgtccacgctctgaccggtgccaccgtgcataatctggcaatcggcggttcctccgctacccggagtagcgatgacgataattccttcccgaatgtcgtacaggactttttagaccataatacggaagaactttccggtgataaaaaactctgtttcctcatcaattacggcttaaacgattattttgagggatattccatcgccgattaccaagacgggctccgcaccggcatccgggctatgcgggaatcctatccggatgcacggatcatggtcatatcctccaattatattctgtcttttgaaaagggaatggcacgcatcggtgacgaagaaaatgtattagaagactatattgccgcggcagaagaaaccgccgcggctgagaatgttgattttctgaatatcaatgatgctctgcagtggaatgaacataatgccgcagaatatctggcagattccattcatcccaacgaggaaggacgctttctgttcggtgtggaggtgatccgttctgggaaataatccctgtccttctcagaaccttgctgttaccagtgaatattctcccacagtatcgatcacttcataagggaattgcaggtactgcaggtctccctcatagagtaccatcagtccatccccgacggcttccgccagttccgctccggatttttccggatagatgtagtgataacgctgtgtgtaatcctcgctctgataataccgggcatctattctgcaggcatactggatcaggatctccgtggctgactggttgaactgccaccccagattgcctgtgatgtacaaactgtcatatccttccatgccgtcagcttcggctacggcatccaggaaatccctgttgtaatactgtctgctctcttccgcatactctgtaaaatacgttgtaaaaaacaatacactgctgactacatacacagccatgataaccggtaagagtttcctgcatttgtccactgccagtgaaataccataagcgcacaacacaatcaccgggtagaagataatattcacacggttaatgttcacttcataggtgatcaggccaacccagatccccgtgatcaggaatccccacaatgccagcatctgcatctgtttttcaatctgtttttccttaaaaaggcgaattgtaaatacaatgattcctataaatacaaacggtatcgacacatgatataagggtccgaatgccggaatcgaattaaagaaaatgtccgggagctgcaggaacaccctgctgaataatgcccacgcattcctgcccagctgtgcaaaggaaaaatttaaaagcagtatatccgcgcttctgagactatccggaaaatattgcatggtaaaaaagggcgtttcgatggtcctgccaaagtgtatcgcattgattcccaggacgatcacctccggcagggcaaccacagttaatagcactgcgcacagcaacccctcccggaatttcagttgttttttccacaggcaccatataaaaaatacaaacaaaaatgccgtgacggagtacgccgctattccataacaataaaatgtcaggccgaaaaagagcatggataaatacaaataccgccttttctccagtcccaacaacagcagataaaatgccaataaaaatacatgtgggaacagattacagtccaacgaccagcggctctgcatgaactgccagggattcaccgccgtcaaaagcatcgctataaaagcaatcctctcattaaacagcttttccgacactaaatataccagtgcaaccgccccacaggataccagcagcatcggcagtctcactgtcacagtgctaaagccaaacaccttgataaacggcaccatacaataggatagcagaacactcatctgactgtatttccaggcctcaaaatgaaccggcagaaacgtgccataacggtcagtaccgtattttgatagtgcccatgcatccatggctcccatggcttcatcctggttaatcccatccggcactgccgcaaaacggatgcagcgcaagataaacgccagtgccagaatggaccagaacagaacttgcttttttctcattttaaaaaaggcaacaaatttttcctgtgtaataaaactcatgatagtagtatcctcttcaacctgattattcgttgtcttatgcagctgttgtaaaaatgcataagtaaactactatcttatcataccacatttgaaaaaaattgtcgcctattgttctttgtgcctagcattgcccagcattgaaaggtaaatctactttttccttatcctgcacactgatctctttcccgatctgtatttcaatcagtttcagctccgtttgggcgatcacggtgtggttgcatccggcaggcatcgttaccacatccccggctttcacctgcttctccgtgccgtcgatcacggtcattccctctccggagatgacgacccagacctcatcacggtgcttgtgattatgatagttcatggaatgtccttcattcagcgtcactttgatggtcatcgagccgctctcgacgtccagcacgcggaagcttccccagctcttctctgcgaacatgatctgctgttcgaatttatccacgaacggcttgatgtaggagctttgctctttgtcagatacgagaatgccttccggcgatgccgagatcacgacatcatgcaatcccatcgccagcaccggcacatccatctcattcacgatatgcacattggagcagttgtcattcagcactccttttcccacgacagcatcctgcatggcttccgtcagagtattccaggtaccaaggtccttccactgaccggagaaacgctgcacctggattttatcttctttttctactaccgcataatcaaaagaaatcttcggaagagtctcatactttgcaaacaaatcatgataatccgtaaaatcgattaatttatgggcaatctccatgacatacttcagcttataagcaaagacgccgccgttccacagtgctccctgtgcgatatactcttttgccacatccgcagtcggtttttctttaaaagtcgctaccattgcggtctcatccgatgacttcggaatgatgtaaccgtatttttcactgggataggtgggttcgatccccatcagcaccagattcgcctcgcctttgtccgcctgggcagaaagccgcttcagggcttcaaaataatccgcttccacataaggatctaccggacaaacgaccacagattcctccggggagatcttctgtacgtccaccagataagcagtagccagcgcgatggcaggaaatgtatctcttctacagggttccacggagattccgacatcctgccccagctgattatggatcgcggatacctgcgtcttgctcgtagcaatcgtcaccgtcgcttcggtatccaccttcttgatctggtgatagacacgctgcaccatggactcgtaggagccgtcctcctgtttgaatattttgataaactgtttgcttctgacatcgttggataggggccataggcgtttgccggagccacccgacagtaatacaatgttcatatttatctctccgctctcattggattgttcaggaaatcttcatacgccaaccggataccgtcctccagttccgtcatgtaatgccagccaagtttctctgccttgctaacatccagaagctttctgggggtgccgttcggtttcgtcgtatcccacttgatttctccggtgtatccgactacctttgccacaagttcggtcagttccttgatcgtcagttccttgccggtaccggcgttcacagtctcattgccgctgtaattgttcatcaggaatacgcacaggttggcgagatcatccacatacagaaactcacgtagcggagagccgtctccccagcaggtcacctctgtcttaccctctacttttgcctcgtggaaacgacggatcagtgccggcaatacgtgggaatgggtcggatgatagttatcattgggtccgtacagattcgtcggcatgacagagatgtaatctgtaccgtactgcttattcaggaattcacaatacttaaggcccgagatcttcgccagggcatatgcttcgttcgtcttctccagttcggaggtcaggagacagtcttccttcatcggttgcggtgccatccggggatagatacaggagcttcctaagaattccagcttcttacatccgttcttccatgcggaattgatcacattcatctccagagtcatgttaaaccacatgaagtctgccagagcgttctggtttgctacaatacctccgaccttggctgctgcgaggaacacatactccggcttctctgccgcaaaaaattcctctacctctgcctgacgggtcagatccagctcctgatgcgtccgtgtgataatgtttgtatagccctgcctgttcaattcacggacaatggcagagccaaccattcctttgtgtcctgcgacatatattttagcgtctttttccatcattttcttttaccttcttatcctatttatcttccagccactaccgttaccatgtgctatcctcatagcatcaatgttgcgtgtcttgatagttctcactttttgcaatttacttttcagcgttcattcttatttttactatcttagcataggccatttgataatcattacgcttttaaattcttggtagtcttatttcacaacacctttttccaggtactctgccagattggtacggatatgttcttccgctctttccacagcgaccttctccatgtcgtgtttcgtcatcagttctaccagctgttcgaagcttgtcttggtcgggttccagcccagctctgtcttcgccttggtgggatctccccagagattgaccacatctgtcgggcgatagaaatcaggacttacttccacgatgacctgaccgttcgccttgttgattcccttttcctccaggccttctccctgccattccacttcgatgccggcataatggaatgccagtgttgcgaactcacgtacagaatgctgtacgcctgtcgcaatgacaaaatcttccggcttcttgttctgcaggatcagccacatgcactccacgtaatccttcgcatagccccagtcacgcagggaatccagattgcccagatacagcttgtcctgcttgccctgtgcgattctggctgctgccagggtgatctttctcgtcacgaaggtctcgccgcgtctctcgctctcgtggttgaataaaataccggagcagcagaacatgccataagcttctctgtattctttcgcgatccagtagccgtactgctttgccactgcatacgggctgtaagggtgaaaaggtgtcgtctccttctgcggtacttcctctacctttccgtacaattcagaagtagatgcctgatagatccggcaagtcttctccagtccacacactctgacagcttccaatactctcaatacaccggttgcatcgatgtctgccgtgaactccggcacatcaaagcttacctgcacatgagactgcgctgccagattatagatttcatccggtttcacctcgccgatcaattttaccaggctgatcgaatctcccagatcgccgaatttcagatgaaaatgaggagttccctccagatgcgcgatgcgttctctataatctacggaagaacgacggatcatgccgtagacttcatatcctttctccaataacagttctgccagataagaaccgtcctgtcctgttactcctgtgatcagtgctctcttcacttcgttacctcctgcgttttcctatggggtatcattttgcccatatattacatatctcttgcctatcttcctcatttagacctgcatacgctttgcgccgcgtaatgtacgtctcaactatagcctcattatagtataacaaaaaaagaaaccaaagacactttcttcggtttctcttgtactttcttcggatttattgtatctcattaccacattcctcgatattccgtaggcgtaacaccttccacacgtttgaacattctgctgaaatatgctgcaccatttatcccgaccattgttgcaatttcttctgttgtcttgtccgtgaaacgcaacagccgttttgcctctgtgattctcacggacaccagataatctttcagtgctatgccatattgttccttgaacatttccgataaatacgttttattgataaaaaactgtgccgccagtccttccagggtgatctccgaggcatagttgctgtcaatatactctcgtaccctgaccacctgcacccgttttcccttcacggcattgctttccggattccagctatcctccatcaaaagcaccagcaattgtgataagagcgcattgatctccatgtcgcggacataagaatccgaagctgcaaccgttttcattttttcgagaattccccggtattccgaagtcttttgtgaccggaagactgtttttccaccacgaaccttgtatttttcataaatatgtgacatctgtgggccatcgaaatgacaccatacaagcgtccaaagctcttcttccgtcgtatgtgcatacggcagcgtacagtcgaggaatacggaatctccggcacgcagctcataggtctccccaccgtaagtcagtctgccgctacctgacagcaccgtaaaatacaa

SEQ ID NO: 153 - DNA, 13670 bp, unidentified
  source 1..13670: mol_type = unassigned DNA
ttacatatactcgctgaaaggagtatagatattcctaatatcattagaattcctgccgttttcattttcgtcctccgtcaaatcaataatgtcaaatccttcatcaattccgtgtaaaaaaacaatgtgcgaaaattcacgagttgagataagctgaatagctatttgatttctcattaaatcattaatcgattttaaatggatagataaaataaacgacgtaccgcttgaaaatccgaattttattgcctctacttcatccgagtttcctatttcatcgcaaactattaattcaggcgaaagcgttcttactgccaattcgattcccttagcttttttatacgaggatataacatctgtattaattccgatatcaaagccggaagaaagttctttcctttcatcaataacgcttatttttttatattttcctgcatatccgcttgataaaagccgtgtcatatctcttaatattgttgttttgccgcttgaaggcggacctgcaataataacacttggcgttgaattggcgaaaagaatatttaaaatattttttgagcaatcaacaacattatgagatattcttatgttaagactgcttatattcttaacgcttgaaattaagttgtttttataaacagcttcacctgctatacctattcttgaaccgaatttatcggttacgtatccgtcaatcattgtttgcatatttgtatgatacgaattattacaaaaactgtcgagaataaatataaactcatcatcgctgataaatctgcaatcgttcaaataatgattaataagcttgtcatatttactgataaaaaaaggtttatcaagaatgtaaataactataggtttattaactctaagcctaatctcagttatttttgacaaaacagatacatcaaatgacaaaaagcagttttttaaatcgcttggaaagtgctctaaaacagaaaaaatattgtccataaaatcaccttgcttaatagtatgctgaatttttgaaaaatataacaaattttcagttgaagtagaaaagcaaatgtgatattatatgtatataattataatatttacggaagtgcggttgcagtaatgaatagcaatataactatcaacacaaaaactaacaaattcattaacggcgaaacggttagctatactcttatggctacggtttcgctttttgttctgtttgcgttaaaacagatattaaaagtttttatcggcgttgctgttgctccgagctgtatcatcgcttttatcacggcaagcattatttcatttttacttgaaagaaaatttgtgtttggcaaaaagatgttagcttcaaacgctaaacaaataatattttttataatcagagcagcagttaacttcggcttttataaactttcggaatttgggtttaaaaatatgcttgatatgccaatcacgtttgtttggtttatagccgttgtaacttcttttttatttaactatatctatgacaggacactcgtttttgattgcggatatgaggcaataagtgtaaaacagtcaagaatatataaaaccttttataaaaatagatatgtatttttatcctctgccttggcactcttatgtataagcattctttatatcatttattcaacatttccgtttggcgatacaactgttatgagaatggacctttatcatcaatacggaccgctttttgccgaactttatgacagaatagttgaacacaaaagcctgctttattcttggacaacgggcggcggctcaagctttttaggcaattatctaaactatctgtcaagcccgctttcatttttaattttcctttttaataaggaggatattgcatttgccattacctttatagttggattaaaatgcatattaagtgcaaccacattcagttactacttaaagagcagctttggcaaaaataattattacgtaagtgcattcggcgtactctatgcctttagcgcatatttccttgcatattattggaatattatgtggcttgacggaatgattatgctcccgcttattgttctcggaattgaaagaattttcaataaaggagacattaagctatatactatttcaatgattttgcttttctttgcaaattattatatgggctatatgagttgtatattcgcagtaatatatttcgttgcatacttcattatttcatacaaaaatgacggcaaactcaatcctaatgcaaaatttgaaaagaaatattcaacaaaagcattgatgaataacacttttattaacagagggattaaatttgcatttgccagcatcattgcagcaatgttttgcgctattactttaataccggtgtttatgatattaaagaacagttctgcaacgtcaggcacgtttcctgatacattcacaagctattttgacattcttgacttcataacctctcactttgcaattctcgaaacaactataagaagcagtggcgacaacgttctccctaatgtatataccggcattttgacgcttatattgctgccgttattcttactcaacaacaaaataagtcttaaagaaaaagcgacttacgtgcttttgatggttttctttattttcagtttcaacaataactgtgcaaactatatttggcacgcattccattttcctaatgatttgccatatcgtttttcgtatatgtattcatttatagttgctgttatgggatataaaaccttaattaatttcaaagcaattaatattaaagatatcgtatattcgggacttggcgttattgcaatcgttattttagctcaaaaatttcttactaacaaaatgactaacggcaccatttatgcaacaattattttagttgcactttggtgcggatatcttcttatcgttaaaaacaagaatattcaaaaaagactgacagcatttgtgcttatagtatttttagtcggtgaaacagttataagtgccgttaccggaataccgcttaatcaggaaaacggaaactataaagaaaatttttccacatataacgatgcaatcaaatatattgactcaaatgataaagacttctacagaacggagctttgctatctaaatacacgtatggacccgtcttattacggctataacggaatatcagtattttcgtcaatggcatacgaatcatattcagagcttcagcatagcttaggaatgttcggtaatagaattaacagctatacttacaatcctcaaacgcctgtatacaatatgatgtttaacattaaatatttaattcaaaccgatgtaagcttagctccttcttctaatctttataaaaagaaatacacaaccaaaaacaaaaaggcaaatgtatatgaaaacaagtataatctgcctatcgcctactgcgttaattcaaatattgaagattggataacagatgagggcaatccgtttgaaattcaaagtgactttataaagcttgcaacgggatattcaaatgtgtttaaaaacgttgattatatcagtaccgactttgactcagtaacaggtgatgacgttactgaaaacggaacatattggcttaataaaagcgatgcttcatcaaaatacggcacagaaacaattacgctgtcacctactatcgacggaaacctttatctttatgttaagtcaagcgatttaaagagcataactgttaattctgaaaaagtatctgatattacacaaaacacagatgaggaatatttacttgaccttggtttccacaataaaggcgatgaagttaaggtctcgcttgacggcggaactatggaaagtgagagcacatcgtttgatatttattgttacagttgcgatgactcggtattgaaaaatgcttataattctctttccaagaacactttaaatgtatcatcttatagcgacacatcaattaaaggtactatttcctcaaaagaaaattgttatttatattcatcaattccttatgatgacggttggagcgtatatgtcgatggcaaaaaggcagaaacatttgaaatcggcggtactcttcttgcaattgaattaactgcgggtaatcatcaaatcgaatataaatatactccatcaggccttgtttacggcatagcggttacggcaattactgcatttggattatgcggttattatatattcagtaaatcttctttaaaacttaacaaaagagcgagaaagaaggagaaaaatattgttgaataaataaaaatcagtataattcttaaaaatctatttacaataatgtgcttttattgtagaatacacgtgaacatttgagaggagtttcatattactatggcaagacaaacagcaatcagtattaacactattccaatcggtccacttggcataatcggtatgccgggatgcgaagaattaacggacaaaattgacaagtacctcgttaaatggcgcaaaactcaagcaagtgagcatgctgagtcaattgctttctttggctatcagagagatacatataaaattgatgtatctattccacgttttggcagcggcgaaggcaagggtgttattaacgaaagcgtaagaggttacgatatttatattgtgtgcgacgtatttaactacagctgcagctatgatatgtacggcagaaaggtttatatgtcacccgacgatcattttgctgaccttaagagagttatttcagcgctttgttcaaaaccaaaaagagtttctgttattatgcctatgctttacgagggcagacagcacaagagaagttcaagagaatcacttgactgtgcaatggctcttaaggagctcgttcatcttggtgttgaaaacattattacgtttgacgctcacgaccaaagagtacaaaatgcaattcctgacaaatcatttgaaaatgttatgccgacttaccagatgattaaggcacttgtcaacaatgttgaagacttaaatgttgataaggaccatttaatgattatctctcctgacgaaggcgcacttcacagatgtatttattttgctacacagcttggagttaatcttggtatgttctacaagagaagagattatacaagagttgtaaacggcagaaatccaatcgttgagcatcaatatctcggtgattccgttaaaggcaaagatattatcattgttgacgatatgatttcatcaggtgaatctatgcttgaggttgctatgaagcttaagaacttaggttgcggcagaatttttgtgtgcacaactttcggtctcttctgcaacggtcttgatgtatttgataaagcttataaagacggtgtattctacagagtgtttactactaacggtgtatatcagccgcaggagcttttggacagagaatggtatgtaagcgttgagctttcaaaatatgccgcatatttgattgacacattaaatcacgatatgtctgtttcaagtcttctcgacagctctgcaaaaattgatactttgttaaaaaataaaggtttaaaggactaagatattatggcaaaagtaaaattgtctaaagctaaaacagctataattattattgccgcaattattttcgcacttttggttgcaggcggaatttattgcgttgcaacagaccaaagccctgctactgcaattgaagcagcaacagcgcatcaggacaagcttgtcggcaagtggcaaagccaaaaatcgccgggattatccgcttatgtattttatgatgacggaacgtatgattcttatttgtctacagttaatttttcaggcgaatatactgtaaaaggcaataaaatcactttgacaaatcctaatactaacgcacaggttgtttataaatacaaggttaaaggcaaggttctcacccttactcttatggaagacgacaaagaggcagaatcaaacgcttatgattctgttgatgaacttcaaatgaaaacgcttgcagatttaatcggcgattctattaaagacaacaatacaactacacaagcacaataattaaaaacccctcgtcattgacgtggggtttgttctatttttagttcactttccatatacattaccaaggaaggtgaaattctttgattggtaatgtggaaaaacgttgtatcgatttaggacattatataattgaaacaggtgctactgtcaggcaagcggcaatagttttcaatatcagtaaatctaccgtacataatgacgtcacaaagcgccttgcaatgattaatcccctgctttgcagtgaggttaaagaggtacttgagcgcaacaaggctgagcgtcacataagaggcggacttgccacaaaagaaaaatacagaaagttaaaagataacaaaaacattgattaataagcaaaataatgctattataaaaaaagaaaatcaaaggaagtgtaaatatgaagataggttttataggctgcggaaatatggcaactgccattattaacggaattacgaataataacgtcgtaagcgaaaaggatataaatgcttatgacatttttgacggtgcaaccaaaaagcttaaagaaaataaagatataaacatttgcgaaaacgaaaaagacgttgtaaaatcaagcgacattatttttcttgcagtcaagccaaatgttcaggcaagcgtattaaaagcaattgacggtgaaattaaggataaattaatcatttcaattgccgcaggaaaaacaattgaatttatcgaaagcaatttaaaatgcaaagctaaaattgttagagttatgccaaacatcaacgctaaagtcggtgaggctatatctgcttattgctttaatgattcagtaaccgaagaggacaaaactaacgttgaaagccttttaaacggaataggacaggtactttgccttgatgaaagctacttccctcttttcggtgttatcggcggctgcggacctgcttttgcatatatgtttattgacgcaatggcacgtgcaggagttaaaaacggaatgaaaaaaagcgatgcacttaaaatttctgctcaaaccgtattaggcagtgcaaaaatgattttggaaagcaacgagcatccatggcagcttattgataatgtttgctcccccggcggtacaactatcgagggtgtaacctcacttcaggcagacggctttgaagcggcagttcacaatgcagttgataaagcgcttgataaagataaaaaattataaaattaaagttcggttttgggttactccctttaccgagcttttttctaaagtttttataaagatattattaaactattgacaatgtttattttatatgatatacaggacttggaggtggttatatgaaatattcttttaaagattatcttattgatacacttatgtttggtttatctgtatcaattaccccaattatatatttgtcaacatttataatagtaaacaaatttaattatataaattcccctgttaacttatatttagcaattttcatttcatttttgttaccgtttatattcggcatttttctttcaagaaaactttgcaaacaatctgtatgttcatatttaacagttttcttaataatggaaataatttgcatatttcatatcaaaattccggatagttattttgtttttttacttcctcaggaagaatggataagaggattatttaataagtataatgaaatcagagaaataataatatctattattacaccggttttatacacactcttatattttttaggttcaaaattaaaatcaaaaaaacaaattaataaataaactataaaaaataaaagctcggagcaatccgagcttttttcgcataatttttatagtatgattacatatactttttgatttcatcaaccatatcggtcttttcccaagaaacaccgaggtcttccctgcccatatgaccgtaagcagcaacatttttataaatcggctttctaaggtcaagcctgtcaataattgcagacggacgaaggtcgaacaccttattaacaatatctgcaatcttttcgtcatcaagcttacctgtaccgaacgtatcaaccataacagaaacaggctttgcaacgccgattgcataagcaagctcaacctcgcacttatctgcaagacctgcggcaacgatattttttgctacccaacgagaagcgtaagcggcgcttctgtcaaccttagttgggtccttaccgctgaatgcaccgccgccgtggcgagcatatccgccgtatgtatcaacaataattttacggcctgtaagacctgaatcaccgtgagggccgccgattacgaatctaccggtaggatttacaaaatattctgtatcatcgtcaataagatcagcaggaatagtagttttaataaccttttcaataatatcgtttctaagttgagaaagctcaacgtcagcgctgtgctggcttgaaacaacaacagcagttacctttacaggcttgtcatcgtcatattcaaccgtaacctgggttttaccgtcggcataaagataaggcaatgtaccgttttctctaacctctgtaagcttaagagcaagcttgtgagcaaggctgataggaagcggcataagttccttagtttcattgcaagcgtagccgaacatcataccttggtcgccggcgccgttgaggttatattcatcttcttcgtcattcttaagctctaatgatttatcaacacccatagcaatatcaggtgactgacggtcaagagcaagcaaaacagcacaggtgttgccgttaaagcctttcttatcatcatcatagccgatatcgcaaacggtttttcttacgattgacgggatatcaaccgtagctttagttgtaatttcacccataacaagaacttggcctgttgtgcaagtagtttcgcatgctacacggctttgcgggtcttgctcgagcattgcgtcgagaatagaatctgaaatttggtcacaaattttatcaggatgaccctttgttacagattcacttgtaaacaaatgttttgacataatatattcctctcatcaaaaaaatttgttaattgctttagaaagaaaaaagcacacgtaacgagcgtgtgcacttagctatcatcactcggtaagccgcaggtattagcaccttacaaatgcaggttgctgtggtttcacagggcctgtccctcaaccactcttgataaagcatattaacatcacacatataatacaacaacgattagataaagtcaacaaatatttataaaaataaaggttattttgtatttactattgtaatttcttaataaatagtttataattatatagcaataaaaggcatatagccttataaggaggaaaattatggcaaagaaaaccgtatttattaccggtggtacaggtaatatgggttgggctgccgttcaggaaatgcttaagcatccaagtgatatcaatatcaagatgcttgcaagaaaaagcccaaagaacgaagaaaagcttaaggatttaatggcaaagccaaacgtaaaggttgtttggggtgaccttaatgattacgattcaatccttgaaggtgttacaggctctgactatgtccttcacgtaggtggtatggtttcaccgactgctgactggaaaccttacagaacacaaaagacaaacatcggtgctgcacaaagcatctgcaaggctgttcttgctcagccaaaccctgatgcagtaaaagtttgttatatcggtacagttgccgaaactggcgaccgtaactatcctatccattggggacgttgcggtgaccctatcaaaatttcaatttacgaccactatgcaatttctaagaccgttgctgagcgcacatttgttgaaagcggtattaagaattgggttgtaatgcgtcagtcaggtattctttatcctaatattcttaagaatatggatcctattatgttccacgttccaatcaacggcgtgcttgaatggtgtacagtagaagattcaggcagacttatgtgcaaccttgttcttgaggataaggcaggcaaccttggcgctgacttttggaatcacttctacaacatcggttcaggtaaggaatacagaatttctaactatgaattcgagcaacttcttctcggaacactcggtcttgcaggccctgaaaagctctttgagcctaattggtttatcactaagaacttccacggtcaattctatgcagacggtgacaagcttgaagaatacttacatttcagagaaaatcttcctataaaggactatttccacagacttgctgaccacgttgaattctatttcaaaataccaagatatcttccaaagaatcttgtagcagcttgtgcaaagccgtttatgaaaaagattgcttctactcctgacttcggtactcttgattgggttaaaacaaataatcctgaaagaatgtctgcatactatggttcacttgaagaatacaacaagattcctacaaagtgggaagactttaaaatcatcaagtttgataaggatagcagcgcagcagaaaagtttaagcttgaccatggttatgatgaaagcaagcctgaatcagagcttgacattgaagatatgaagcaagcagctaagttccgtggcggtgaatgtctcagcgaaacaatggttaagggagatatggctacaaagcttaagtggaaatgcggcacttgcggtgctgaatttgaagcttcacctgcacttattcttcttggcggtcactggtgccctgaatgctacattccacagaaggaatggaactatgatgaggttgctaagactaacccgttcttcgctcaggtttggtatcctaaccacactaaggaagagcataatgtttacaagtttgatgacctcttccatattaacggagttaaatgggacgatattaagcactaagcactgacttaaatacatataaattactaaacaccttgcattaatttgcaaggtgtttttcattttttgaaatatctaaaacaataatataaaaaagctgtcatcaacgatgacagcttttaaaatacgatattaaaatgttttatgtattagtcaaacaaaatgtcagtattagcaaatgaaagcggtacatattcaccgttatttacataataaactgcagaaagcttaacggcaactgcatattgcttacctgaacatgtaaacatatagcaatcagcaccatttacagtcttaatactattattaaatgaaattgcgctgtttgatgcatctgaactgtaacctatttctctccaattatcgtgaattgtttgcttaagcatacgcttagcatcattaacattataatcaggagtagtagtaatctcgtgtggattagaataaaggtcatatacagccggttttttgctttcctctgcaacggttgtttcctcaacaacaggtgcgacataagcagtgtttacatacataatgatgaagtaaattaagaaccaaataagaagaaggagaattatcataaggataatctttcctgccttattttgatttgcagttgatgaattagcaaattcctcttcggtaggaatttgaacaggaacgaaaggtttacctttctttgcacactttttctctaccttggcattcttcttttctaatttcttaacatactttccgtatgctttagttgtagccttttcagccttgatttccttctttgtttgatattcatcaacattaggaattgcgataggaacaaattccttaccgtctttttgagccttagcctgaagctttgcattcttcttttcagtatcctttacgaagcttgcataagctttagcatgtttcttttcagcctttgctttatatttagcatttgctttttcagctttagcttctttcttttcagattttgcctctttcttggcaagtttctttgtttgcttttcttctttagtcaaggcacaattacccccttataagtctaatagtagtataccattaaagatattaaatttcaacaaaaaaatatacagaaatggcagtattttatgaacaaattgtaaacattaacgctttttgaactattttgtaacagaaaaataaaaaatttagaaaaataagacaaaagttgaatatttacaaatatagttattataaattaaactgaccaatatatagtatatttatttagtataaagcgaataagtgccgtgattttcacggctgataaattctttcttttcaaaaggagaattaatattaattgccgcctcaataagtttctttgtaagctcaggtacatcagaacgatttaaagcctcatcaacgtcaagccacaacacctcgctgttttcatcattgtcagaatgttccctaccgcttacataatcagcggaaaatgcaacataccaatccttaagattaaacctaacagcgataatatttttaggctcaatcacaactcctgtttcttcaagaaattctctttttactgcctgttcaggagtttcgtctaaattaagatagcctcccggaacaataagaaaatccttaccggcaccgtatgtatgacgagcaaggagcactttgttgtccctaagcaccaaagccgtgacagattgcttataacacgtattttcgccgttcatattatagttcctccgccaatgactgtatcgccgtcataaagcaccacagcctgtcctttggttattgctctttgcggctcatcaaaaataagtttcagtttgtcgccgtccaaataagcagttgctccctgctctttcatattataacgcacacgggctttacacttaaattcattgggtaaatcaggaacaagcaaattaaaatcaactgcgtttacttcccttgaaaacagttcgtcattagtacaaagagttaccgtattcttttcaatatccttatcggcaacatacataggcttgccaaaagcgacaccaagccctttgcgctgaccgtttgtgtatctaataataccatggtgccttccgattacattaccgttaatatcaacaaaatcaccgtcgggatatattttaccgagataaccttcaataaacttagcgtaatcaccgtcgggaacaaagcaaatatcctggctgtcacgcttgcgtgcattcaagaaatgctgctcctctgcaattttgcggatttccgttttagaatattcgcccaaaggaaattgaatatgcgcaagctgattttgagtaagcgaataaagaacataactttggtctttagtatcgtcactaccttttttaagataaaaccagccgtctttttcctcaacaattgcatagtgacctgttacaacataatcgaatccgagttcgttcatacgttgaaaaagcttttcaaactttaaatatctgttacaatcaatacaaggattaggagttccgccgttttcataagttctgataaacttatttataactttttcctcaaattcgtctttaaaattaaaaacgtaataaggcatagaaagacggcgtgcaacagcccttgcatcttcaatatcgtcaagcgagcaacaggtcttttccctactgataccgatttcctcgttatcataaagtttcattgttgcgccgatacattcatatcctttttctttcattaaaaaagcggcaacgctggaatcaacgccaccgctcattgcgataatacattttttattcat

SEQ ID NO: 154 - DNA, 21014 bp, unidentified
  source 1..21014: mol_type = unassigned DNA
ttattccacaggaacgatccagcccttggtgtcgggcagcttgccccactggatgccggtcagcgtgtcatacagcttctgggtcagctcgccgatgtggccgccgctgatgtgggcaaccttgccctcccaatccagctccttgacaggggagacaacggcagccgtgccggtgccaaagacttcctccagcttgccctcgtcggcagccttcatgatgtcggcaatggcaacacgctcctcatgcaccttgtagccccagtccttcagcagctcgatgatggagcggcgggtgacgccgggcagaacggtgcccacgcagggggcggtgtagatctcgccgtcgatcttgaacatgatgttcatggagccaacttcctcgacgtacttcttctcaacaccgtccagccacagcacctgggagaagccgcgctcctcggccagctcgccggccttgatggacgcggcgtagttgccgccgcacttcgtaaagccggtcaggcccggggcggcgcggatgtactcatcctcaacatagatgcggacggggtcgagtccctcggcgtagtaggcaccggagggcgcgcagatgatggcaaagcggtaatgcttggcggcatgaacgcccaggcccacatcggtagcgatgcagaacgggcggatgtacagggacgcgccgtcggagtggggcacccagtcgcggtccacatcgaccagcgccttgaccgcctgcacgaagtcctccggcgggatggggggcatgccgagacggtccgcggaatcgttgaaacggttcgcgttgcagtcggggcggaacagctggatcttgccgtccgcggtgcggtaggccttcatgccctcaaaaatttcctgtgcgtagtggaacacggtggtagccgggtccatctcccacgggccataggggacgatgcgggcgtcatgccagccctcgcccgcggtatagtccatcaggaacatgtggtcgctgaactgcttgccgaagccgagcttcgactcgtcctgcggcttttccttcggatgggtcgttttggtgattttaatgtccaacataatttcacactctcccttttatactcaagcgcaccgccgcacagcggtgcgggtgatggttaggtttattatagcgctgtcgcgcggcgagtgcaagcccttatttacaaaatgtgtattttgtgttgcaaaaagcgcaatttgcgttttccccggctttccacagttttcaacagcgccgctgtggaaaatgtggaaaataaacgttttttctacgtagattttcccggttttccgcttttgaacgggtccgggcggcagagttttccacgctttccacggagttttcaacatttccacggtggataaccgttatacgccgtggataactcggggtgaatatacggaatgtgaacggggtgtgaacagaaaaagcgtgccgctctctttcccacaagagagcggcacgcagtccaaactcaattttcttttcggtgcaccacaaacatcaccatgctgaacaccagcatgaacgctgccagccctgccgcaatcagcaaaatcagctggaagaccttcacgttaaagtttgtctgcaaattctcacgcgcggcggagaccacatccgaaccggaggaaaccgtcgattgggcgttattggccatctcctcggcggcggtcagtgcggcctgggcggcgtcggtgtcgcccaacgcctccagcgcgtcggccagtgcctgcccgcccatggcaaccagacggtcattcgtctcgctcttgatcttctcgtgattgaccgcgttggccaggtactcggcaaacaggtctgttgcgccgcgcacggcgggggcgtagtcgtccttgatctgccagcccttgacggtccacataccgttcatgtagaaaagcaactgcataccggaatcctccagcagagcactgtacacggcatccgcaaaggccgtgctcgaggtatccaccgtgccgaagctcagcgagatgaactccttgacgcggtcatactcggtcagattcgcgtagtagctgcgcagcgcctcggccaggtcggtgtcctttgtcaccttggagccgacgacgacggagtcgaggtccgcccgcaggtccccgttgctgaagcggctcagcgtgccgtcatcgtctttattaaaggaagcacgcatcgcctcggcgtagcccgcggcatcgccggcctggccgtaatactgcctggccagttcctcacagtcgccgccccagctgcccgtgatgggtataccgttgtagacaaggttcatcgacgccagcaggtgcccaaagtcgatgctctctccgttgggcaggacgacggtgttcatattctgcagcgacgccagctcggggtcactgctgttgacgcggctctcaaacccggcatcgcgcacaccggcggtcagctgccagatcgtggagttgtactcccccgtgcgggtgtaggccagcgtcagctcgatcgggtcgggcgtgtcggcctgactggccgagtactcctgcgccagcgcctgcaggcgggacaggcgatccagcaccgtgtcgtagtcctccgcatgggcaggcagtgccgccgcgcagaacagccccagcagcacaaacagcatagccagcaggcggggcatacggttcgctatagaattcgtagtcaagcacctccggtaaaacaggacaaagccggggcaaggctgcgcctgcgccccgggtctgactttttaaccaatttgtaatctttagtataccacatccgccccgggtttgtcacctgtttttttgtgtgtattctgtgcgtcttgactttttgccctgcataggttttaatagaggcattacggaggtaattctatgcacaaacaaccgcataaacgcgctttttatacccttgcaggctgcattgccgcgctggcgctctgcgtggcggcatcgctttttctgctgacgcccgcaccgaaagcgcaggacgtcaccatacccggcacgcgcggggacatttacgccacggtacagctgcccggcaagctggcccgcggggaggagctgccgctcgtcgtgctctgccacggctttaccggcagccgcagcggcgacggccactttgcgccgctggccgccgatctggccgcccagggcattgcgacggtgcggctggattttcccggctgcggcaacagcaccgagccgttcacggcctacacgctgtccaacatgaccgacgacgtcgagagcgccatcacctacatgcagcatacctacggcacggaccgcacagcgctggtgggccacagcatgggcggacggctggccagcctctacccgcagcgcaggggcggcatcacggcgctggcgctgtggagtcccgccaacggcgcgggcctgcgcggcatggagtttttgaacatcgacgacttttccgccgtggaagcgctggccgctgaggccgaggcgagcggcagcatcagcacctggggcgtcgatgtcagcggaacgctgttcaccgagatgcgcgattccgacccgaacgccgccctgcgggagagcgccctgccgacacttttgacctacaccggccatgagggcattttgagcgacacgacccaggccgagacgatagccgccgtcgagagcctgcccgacggcagggtcgtgctggagccgtttgccgaggggaaccacaactatctatccgaggacaccgccaccgccgccgcgctggacaaagcgctgcgggagacgacagtggcgtttttggtggagtatttgaagtaggcccgccgcacctgcgaggccgacaggaacgggcacctgacgaagccctttgagaccgtgaccggctgaaaacatcggcaaaatacagaaagaaagtaaaaaccgcggagaagcgcaaacttttccgcggtattcttattgcagatttaccagcacatagtccccgcaatcgacaatcgcccccgcccgggggtatcccggcaggtcgtgggcgtcggcgtaggtctgcgcctgctcatgcagggcagcgctgtgggtcatgtccaaagcaaagccatagtagcggaacaggtgctccgctgcctggccgtagacgtcgtccacctcggagaaggccgtgaccgaccagttcagcaccgagttgcagttggtctcgacgtacttgacggtgtcgccgctctcccagctcgtgtgctcacggaagaagcggtacagcgggtgctgcatcgggtcagccgtcgtgtaccgggtgatattctcccccagcgtgtaacggcccaccagcaccacgggcttgtcggtgccgtagtcgcgcacaagctcggtgcccagagtgcgcaccacagcagcctcctgctcggagcgctggtaatcgacggccagcagatggttcaggtacatggcctggtgcagacagagcagcaccgccagcagctgcacgctgcccagcagcacagcccgccgggccgcagcgcggcgcagcagctcatacacggccagccccgccagcgccacaaacagcgcaaacacctggcaggtgcggtagggcgagtaccgcccctgcacaaacgacagcagcaccagtgagaacagcgtccccgcgccggtgagcagcagcaggggccgctttttgcgcaccgccagcacgatgaccagagcgacaaacaccggcaccgccaccgccaattcagcaatgggcaggtagaaacagccgcgcagtgcgtagttaatcagaatgcccttgacaagcagctttgcaagatagacaaatgggtagaacgcccacaaaatttcggtggcgccgttggccgcagcctgcggcagcacaagatggatgcccgacgtcaccagcacgcgcaggcagagcccgccgaccagcgccgccgcgtaccacagtccctcggtcaggaccgccgcaagccgcgggcgctcggcggccagcagttgctccagcgttaaaagcgcaaagacagccagcacaaacaccgccgccagtgactcataggacgagcagaccaccatcaggcagagcaccgccgcgcccatgcgcagagccctgccacgccacggcacgccgggctggcgcgcgtcccacagcaggttcagcgcagcggcgtccagcaaatagccgccgcagacgcagacattcgcgccgctgtactcccaaatttcgttcatcagcgggtaggagacaaacaggcaggcaaacagcccatagccgaacatgtcgatacggtcctgcgcggccttgcgcagcagcgcacagaagctcaccgccgccagcgccagcagcagcgccgccagcaggtcaatgccaaaggcatagctcggctcggccctgccgtagcccagcaccgcggcccagaggttcatgccgaaccggccggtggacagcatgacgccgcccgtgccgatgtagcggtccccttccagcgagtcaatgctgacccgtgtcgtggcgatggcatagccgtagctgagcagcagggtcagccccagcgccgcgcggaatttcgcgtttttcaggaaataaccaaacgcctgcttcatgccggtcactggtcgtccggcccaaagttgaggcgttcctcctccacaacgagcggacggttcatgatgcgggtgttcatagccatgacgtactcacccaaaaagcccaggaacgccagctgaataccgcccataaagaagatggcgatcatcgtcggcgcgtacccggcgcggaagctctgccagaacagcagcttggcaatcagatagaacaggccgaccagaaagctcagccccgccaccaggaagcccgcgaacgttgcaatgcgcataccggccttggtgtagctggtaaagctcagcatggcggcgtcgtacaggctgtaccagttgttgtgggtcttgcccgcgcggcgctggggttgggtgtactcgatttccttgcgctcggggcccagctcggccacaatgccgcggatgaagggcgtcgggtccttcaggttgcgcagcgtctggataaagctcttgtcgtacaggccaaagccggtgaactgctcgatctgctcgcagctgctcatcttcttgatgagcttgtagtagcagccgcgcagccagtacatgaccgggttttccttactctgggtcttgcggccaatgacgattttgtagcccttttcccactcggccacaaacctggggatcatctccacagggtcctggaagtcggcgcacatcgtgatcgtgcaatcgccggaggtgtggatcatgccgtagtacgggctgttgaactggccgaagttcttgacgttgaagatggccttgacgtgcttgtcctcggcgcagatctgccggatgatggcacgggtgccgtcctcgctcttattgtcgatgaacaaaatctcatagtcgtagttcgggcagctcttgaccagctcatcgcgcacagcctcatagatggggcgggcgttctgctcctcgttgtagcaggggatcattaccgaaatcgtctttttctcactcattttgtctctttccttacccactcaatggtttcgcggattccttcttcaaacggggtcgcgggccgccagccggtgtcctcctgtaaggccgacgtgtccgcctgcaggtgcatgacctgcagcgggccgtaggggacctcccccaagcccagcggcagcgccgggtcgatggcgtcgcgcagcgcctcgatgtagtccttcagcgggcgggccgtgccgctgcccagcgggtagaccctgccgtcctgcccgctgacggccagcgcgtagaacgcagctgccgcgtcggcggcgtacaggtagtcccactgctggatgcccgcggtcagagcgggcttctcgccgtgcagcagcttacggatggtgccgctgatcatcgtggccggaccgtcgtgcgggccgtagacgctcaaaatgcgcgtccagatgtgggccacgcccagcgtccggcactcgacgcggctcatctggccggcgcacagcttggccatgccgtagccgttctccgggaagcagggggtctgcgcggtcagcacgccctccacgcggccatattcggcctggctgccggctccgataaagacctggcaacccagctgcgccgcggcgcggcaggccgcaatggtgtagcggatgttctcgatctgcgccggcatgtcgttgcggcccgggccgatcgtgtgcgtccacgcaaagtggaagaacgcatcggccttttccgggatcagctccggcagcgcggccaactccgccgcatcgcagggcaccacatgcagccgcgcgtcctgcggcagcagcgccgcccgcgcgctgcccgggtgggtgaccgcgtaaaccgtcacaccctccgccagcagctttgcacacagcgccatcccgattgcccccgtagggccggtgatgatggcggtgtggatttgtctttgaatgcttgccatttttgaatcacgcactcccttacacttccggcatcagcgggatgaacatctgcttttccagctcctcacgcggcaggaagggggccaggtcctccaacggggggctgaccagcgtgccgtcgggcaggcgcttggtgctgctcttgggctcccagacctgtttcgtgtcggtgaaaatctcgcagaaagccgggccgtccagtgccagcaccgtgtccacggcctgcttcatctcggcgttgctgtgggcgctgtagtaggggtagccaaacgcctttgcaatcttttcaaactccgggaaggacaggtcgccgctctcggggccgatgccgaccttgcagtgctccttgaaaaggttattctgcgtcaggcggatagagtggtaaccgttgttgttgatgaggaagattttgatcggcagcttgttcgtcagaatggtctgcagttcctgcaggttcatcatgatggagccgtcgccctcgaggcagatcgtcgggcggcgtccgccgccgatgcaggtgccaatggctgcgggcagaccgtagcccatgctggcaatggcgctgttgtttgccatccggctgcccttctggatgacatacgcctggttaccgacgacacagcacgcaccgttggagaccgcggtcaggctgttctccggcaggcgactgcttaaatagcgcacaaaggcgtagacgttggcggtctcgccgttttcctcccactggcggggcaacacggcggggtagtcgcgtttccagcgctggcaggtggccagccactcgccgcccgcgttcacgggggccgcggcagccttatccagcttggtcaaaaagtccttcgcgtcggcccagaccggcatttcgacgtgcagggtcggctttttcagctcggcctggtcaatgtccaccatgatgacctctgccgcgcgggcccaggtcttccagttgtagccgacctggcgaatagaaatgcgcgtgcctacggccagaatcaagtctgcgttttggatagcccagttgcccgggcggtcacccatgttgccggcgcgcccgcagtacagcggattgtcatcctcgatgaggtccacggcgttccagtaggtgacgatggggatgttgagcttttccgccacggagcggaacgccgcatacccgccggacaggcggatgccatagcccgcgtggaacactggccgtttggcgttcttgattttttccagaatcgtccggatcgtggtgtcgtccaccgacgggggcagctgggcgtcatcctcggcggggtcatagccgcgcagctcgtcagtctcgatgtagccgccctggaagttgaccgggatgtccagccagaccgggccggggcggcccgttgtagccagatgccacgccttttccagcaggtagcgaatgtccttggggtcctccagcatggcggcgaacttcgtcatgtactggacggacttggtgatgtcgtactcctggtcgcccatggcgcgcagcggcgtgccggtgtactgcaaggcgtaccgggccgtggtgtcatagcgcacctggccggagacgatgaacattgggatggagtccagccagccgcccacgacgccggtcagcgcgttggtgccgccggggccggtggtcacgcagaccgccgcgatcttattttccagccgggcgtaggcttccgccgcaatggcgcaggcctgctcatggtggttgtaggtcacatgcagccgggggttatggcccagcgcatcgttcaggtgcatagcgccgccgcccacgacggagaaaacatccgtcacgccgcgtgccgccagaaaatccgccacataatccgctaaacgctgtttcattgggttgctccttttccattcagtcaattttcaggaaccaataccgggtggccgtccgttccctttgtccattcgacaagcgtaatcgcttcttctgcgccgctctcgctgtttgctttattcttttctcttactgcggcattcagacgcttcaccaggaaatcactgttgaaaacatcttcgtcggcatagctgacacgcttttcttgaatagcgggtctatcaagcaggcttgtcttttgacccgtcagctgataaacattctctaccataattgagctattataggcgattgcatccgcgttttcgccaccagtcagcgcaccggcactaacacagtttacaacactaccagcgaagttatcggtaatgccaccagcgcgcgagcccgtgacattcacatccgtaaagcagttcataatctctgcctccgggttgactgcatagctggcaattgctccaacacagtcgccagtcaggctgcccgcttcaagccccagattgtaaacagccccttcgagacgtccaaacagaccgacatcctctgtagccttgccctgaatgctcagattgcggataatatgtcccttgccattgtaggtgccgtaaaaatagctttccccgctgaatgcaccaatgggcgtaaattttttaccgtccatatcaatgtcagcggtctgttcaacatactgatctgcaaagctcatgccgcggttgacataattgctgaacgcctgcaaatcctccgccgactgaatcagatacggctcttcctcggttccctttccttccaaggtgaagctaccccagtctgtctcgtctgccagcttgtacaccttgatcttaccggttctttcctcaccatacacgcccaacagggtgtagcgtgtgcccagcagtcgtccaaaattcttttccagctcgcgctgcttcaatttctcaccattgcggtaactttcttcgtgaaccttcttgcagtttggaacatcatccttccagattacaatgtcaggcagattttcctgtagcagctcatcctcctgcaaaacgtactggtcgtctaccacgtcatagaacagaaccggaacaaacgtatccattgtatagcggtttgtcagaatattaaagagctttacatagggatagccaaaaatcgttgcatcttctgttgtgttttcaagaatcagctgtgtgatgtcttccaacatcttgtcgtcctccgcagaaaaacggaagcctcgcagcgcggggatgccggtggcgtagatttttttgtcatactctgcctgttcacagccccaccaagaataggaacatacgaccttctgtgcaatacaagccatcgaaagtactgtgcacagcgcaatcgtaccgattttgaccgatttttccgtaactttatctgtaaatacgctgttcagcccaacacacagaacaaacggcatagccaacataatcccatggtaggaaatttctgatgccgatgccatactggctgcatatatcgtagaaaatgccgcacaggccatccaaaagtgctcacgtgcatagccgtcattgccatccgcttttattttcataagggagcgggcaatcagatatagatccaaaaagctgatgatcgtatacagcgtaccagtcacactcttaaacagcgtgcctgattcatagattgcttccaataagctcccgttatcttcgcctaatgacgcataacgggccgtaaccagaatagtcaccacataggcggcacacagaccgtaaaatacatcgtgcattatcttgctgccgcttctgcgcttttggctgtacgccagcaacagtagcaaccctccaccgatgacaacggcttggacgcttttcgtaccaacgagcacttcgataaagtcgttcgcagcctgcctttccaaaacatagccgccgcctatgaccagcagcaagagcatccgtcctgctgtctgactctcgtttttctgcgccagtgttatggcagctacacaccccaccatcagtaaaaataccggcgcattgattgtccagcccgtaaagattttcagcaaaatggcaagcggactgcctttgcctcccgtgtgcataaagacctgctgaaagaacggaagcaacgcgccattgacggcaaggattcccatggccacgacgaacaccagcaaaaagccaagtatgactgccgcacaatattgcagaaagcctttgtcttttttcttccagcagtagacactcaaagccagcagataaataacccccgcagctgcaaaaatcgtctgcttgttcagaaagagcagccccagcatagcgccggcagcaaacaggtatttcccggcggctttcttatctgccgcctctgcaaatcccagaacacaatagagcagcaacacagacaaaaacggaatcgtctggttataatcaccgaataaatcgtagacagaggccgtgcacagaatcgcagagaaggcacacgctgcaaaggcggcatatctattgaaataccggcagagcagccgaaacatcaactcataaatagcaatccgctgtaccagccaccacgcacggtaaatgaacaggctgccaaacgacagcttccagagcatcacatcaatcaggatgttcagtggcggcaggtaatagtaaaaatcgcggtatggaaatttcccgtgcaataccagctctgcatagtttacattccagccttccgtaatgggcatcgtgttggcgaaataaattgaggaataggccagaatcaccacacaaagcagtgcagccaatacccagcctcgcgcgttctggcgcttattcgtatgtggtttttccattactaattgcatcgtgcttgttctcacttttccttaaatgtccacagcttgttgataacaaagttcagcgggatcgtcactaacagattaacgatgggcgcaatggacttgctgacactgaagaatgcaacttcgatccagagcagcacgttggacaaaatcgatgtgccgccgtaactgacataggtcttacccagccgcttgagcttgctgcgccagtcattggcgttgccggtaaagacaaatttatcattccagaaaaaggcgttggcaatgctcagaatcgtgcccagaatgctgccgaccatatacaggtccgggctgatccacaggaagatatagtagaccgccatggacacagccgtattgcttacgcccactaggccgaacttgacgaactgcttgaacagctccacaaattcctctttattttttgcgcccagcagggccagcaatttctgcatagtatatgtttccttccgttattcggtttcctccacagcgccctcactggcaaccaccaggtttgtcaccgtgaaggtaccgtttttgcgcgaagaagcatcatagaccgccatcgggccgtcatagctcacatcgatttgggtctggccgggggccacatctaccgtgtagcacacggtctgcccctcatggtcaatcttaatattcgtctgcttctgcttcccggttgtaccatcagcatcttccagattcggtgcttcaaacgtcatcgtataggcgcgcttcaaatccatgccgtagcctgtctggaacgtgaccaccatcctttgcgtaaatggcgcgtggttgtaaatcataatatacgcaccgcggccgctccatgttgcctctatcgggttgccgtcgctatcctgcacgtccttctgctggatgtcctcggcatccagtcggccgttgtagccatagtcaaagccccagttgtgggtgcgctgccacagctgctggccgcccacaccggtcaccgccacacaaacggccagcagcaccgtggccgccgggtgtccgtgtgccggcttgaccggcttttccgcacagcgtacacgcaccccctgcactgcctggacaaagcaccagacaatgagcagcagcagcatgacatgacaaatcgtgttgcgcggtacaaaggacggctccatctggtcccgccggaacagcggcagcggcagcaccggcaccatcaaggccagatagggcagcacgttgtccctgcgcagctcacgctcctgctccataaacaggaatagcggaatcaaaaacaggcaccatacataatcatactggggctggaacatcagcatcgccagaatgattgctgtaatgcgcttccactccttatccataaaaaagctgcacaccagcagcaccgctgccagcacaatgcccagcagtgcgtagctgccatagcccagctgcgtgcccagcaacttgtccaccgcatgtccggcctctgccaaaatgttggagaaaccattgccgatccacggttcacctctgctgccgctaaaatcaaacagtacacggaaccacagtgtgaggccaaacaatccttcattgaagaagaacagcgggaagcacaggcagacaacaccgtacagcaccgtgcgcaccgcggccagatagtttttatcgcgcagcagcagcacgcccagaaacgccgggtacagcttgaaaccggcggcaatcgccagtgccagacaggccagctcccgcaaaagtggtttttctgaattgcggtacaggataaaaaatgccattaacggccagcacagcagcagaatattgccgcgttccaagccgtacagtaccccatagctgaacactgcacagaatgccagcagctttttccgccccccgcagctgcgcgtcaggcgttctgtcatcgatacaattcctaagaccaccacgataacaaagacgacaaacagcatcatcgtcgcttgctgtaaacgcaaatcccgttctgttcccctcatgttgagagacgagatatacgattccgtccacgtagctgattgtgtctttggcacaagcaaatacaacacatagaaaaacagatttgcaagcggcgggtacagcgtatcgaactgtccgtagggcatacgccctctcacatactcaatactatggaaaaagtccataccggtatcggtgacatcataaaagaagaatcgatgcagcagcgtaccgcggctggccagcagggcaagcagcagcaccgccagacaggccaccgttgcccagcagtagatctgcataggcgtcagccgcctgtttttgtccaaccgcagtctgggtgcgcgggtcgttttcaccttttgctgcatcataggggtctgtacctcgttgtcaaaattttactgattcacagcctcgataatcgtcttggccatgtagtcgatcatctcgtcggtcatgccgggataaacgccgacccagaaggtgttgttcatgataaagtcggtgttggtcagctcgcccgccacgcggtaggcgtcggtgccgcggatctggtcaaagcaggggtgcttgatgaggttgccgctgaacagcagacgggtctgcacgttgtggctctccacatagcgggtcacgtcgttgcggtccagaccgctctccggcttgacggagatcaggaagccgaaccaggacgggcggctgttggcagccggttccggcaggatcagcttgtcggcggcgggctccagcgcggcgcgcagacggtcccagttgtggcggcggcgctcgatgaaggtggggaacttcttcagctgctcgcagccgatggcggcctgcatgtcggtgaccttgaggttatagccaaagtggctgtagacgtacttgtggtcgtagcccttgggcagctcgccgaactgaccgtcaaagcggtggccgcaaaagttatcctgaccggaggggcagatgcagtcgcggccccagtcgcggaaggagaggatcaggcggttcagcagcgggttgttggtgtagacgcagccgccctcacccatcgtcatgtggtgcggcgggtagaagctggacgtgccgatgtcgccccaggtaccggtaaaacgggtctcgccgttgatggtgtactgggtgcccagcgcgtcgcagttgtcctcgaccaaccacaggttgtgggcgtcacagaacgccttgacggcggacaggtcaaacggattgcccagcgtgtgggcgatcatgacagccttcgtcttgggggagagggcggcctcgagcttggtgacgtcgatgttgtactggggcacggtcacatccacaaacacgggcaccgcgccgtactggatggccggggtcacggtggtggggaagccgcaggccacggtgatgatctcgtcgcccttcctgatctggcggacacccagctcgggggcggtcagcgccatgaaggcgatcaggttggcggaggaaccgctgttgaccagatgggcgaacttaacgccgatccacttagcgaactccttttcgaactggtctgcaaagcggcctgttgtcagccagaagtccagcgtggcatcggtcagagcgcacatctccttctcgtcaaagacgcgggctgcgtaggtgatgcgatccccctcctgatagggggtctttttctccttgaagtcgtgataatactcggcgaccatcgtcttgatctgctcgcgggcttctgcctcgttcttccatgccataggttttgctctccttttttattgcttttcgtagtagtaataggtaattgggttcgtgccgccagccgatgtgaaggtcgtctgcagctggtatccgagcatgtcgggcgtgtagccattctgccccagatagacccccagtatgtcatccacgacaaagctcggctgggccttcaactctgccagaatatgagggagtaatttttcggtatctgccacgccgtaatccgcagcatccacataatgtccgtagttgtcccagcctgctgcatggtagatgattcccacatcgcggccaaccgcaaaggtgttgtccggtatattggcagagaaattctccacctccgcatagatgccgcgtgtgctgaacgcaccgcgctcctgcaggatcactgtattcatcacgccgccgggcagctgtgccgtaagcacgcagagcaccagcagcacggccagtcccacagactgtgccgccgtgcagtacaggccgcccagcttcttgcgtagcccctccccgtccgtcagcgcctgcagcgggaagcacaggcaaagcagtgcctccggcaggcagatctccagattcatccaggcggagcggtttgcatagtaactgaacgataccagccccagtaccgacaggcaggccgcaaatggggcaatgttctcctttttggctattcttccgatagcggttgtctggaacagcgaccatgccagcacggccagcataagcagcagcacaaacacccatgggcgcacgcctagctcaagcgggtagccgatggaaccatccatataattgctgctgtacagcgggtaaaaaaacaccttgaagatcggtgctccgccgcaggccaggttatacaaatttgtcaggccaatggcccccagcaccgccaacacagcgcccagcagcagcgcaccatagcgtttccactggccgcgggcgtaccatggctcctgctgccaccagcggacgatgcagcccgcgcaccagccgatgatacagaacagaccactctcggtgctccacagcactgccagcatgcacagaagccagccgccccagaaccgagccgtttttttcgactgctttttccgcaaacagaacagcatataggccgccagcaacatcgggaataccaaacggtgaggctgcagctgccagtaattcgtccgtctgtatgcaaacggaatgaccggcacaaccagtgccatcaacaggcgtacccagttcttttttatcaggtgatggatgcagtacagcatggccagatccgtcacaacgccgaccagcgcgatcaggaattgaataacaacagcctttgcaccgaaggtcttcatcggcagcaggaagaacagcccgtagtggccgtagatgcctgtcgtcaactcctcataggggatgccgtcagccacgttgtagatgctttccaaatacgcctcaccgtggtacgggtctccctcaaacgtattgacgatccatacgcccaagaagtacatcactgccgaaaggccgtagccgccccaggtcatccactgcgggcagtccttacccgtcagcagcagatagattgcctccacaaaaaacagcaccgtaagcaggtaatacagcggcaccatctgcggcgccatcagggaggacggcgaataggaaggccccgcaaattccttggacaccccaatgttcgcgtaataaataaggtaggcggctgtcaccagcgcagataccacaagggccgctgccgcgccgcgaccctgcagacgcgcgtcgcaggcccgcacaaagccacgttcttgcggcagaatgcgggcaaaaaggttgccgaacagcaaaagcgaaacgccgaacagtactagaactacggcatagttgaccatgttgctgccgatgggccacggctgaccaccccatacatgcgccagccaggaaaccagataggctccacctaccaaaaccgaaatgacaaaagcgcttgttatactcctctgttcctttgtcatttctgcccctccaagaagctgttaatttccttttccatctccgccgggacgtcgccgttggcaagccagatcttgctgaaggcgacggtcttttccatgcactcggccatgtgccagcgcggcgtccagccgaaggtcgttttcagcttgctgcagtccagcttcaggaagttggcctcgtgcggggcattggcctcggcctgattctcccaggcggcgtcgccgccccaggcccggcagaacagatccaccagcgtgccggtggtgacgcagtcgcagtcgtcggggcctacgttatagtagcctgcaaagcggctgtcctcgtactggcgctgggcgatcagcaggtaggccgccagcggctccagcacatgctggtacgggcgggtcgagtaggggttgcgcacgccgatcttacggcccgcggccatggcgcggacgcagtcggggatgatgcggtcattggcaaagtcgccgccgccgatgacattgcccgcgcgggccgtcgagacggccacggtcttatcggcaaaaaagctgttgatgtaggagtgcgtcgccaactccgagcagctcttgctgttggagtaggggtcgaaaccgtccagcggctcgttctcgcggtagccccaggcccactcgttgttgtggtagaccttgtctgtggtgacgttcagcaccgagcggggcgctctgccctgctgctgggccagccgcacacattccagcaggttgaccgtacccataacgttcgtctcataggtgtagcgcgggtccttgtagctgtcgcgcacgatgggctgcgcggccaggtgcagtacaatgtcgggctgcgccgcgtcaaaagcggccttcagcgcgtcaaagtcgcggatgtcgccgatgacgctgtgcatcttgccctcgacgccggcgatggagaaaaggttcggctgcgtcggcggctgcaggctgtagcccgtgacctcggccccggccatcagcagcatcttgcagagccagctgcccttgaagccggtgtgaccggtgacgaacacccgcttgccgcggtaaaattcaggatcgtaatgtaccatcatcaatcctcccacttcttccagggcgcgttgccggtggcaagcattttctccaggacctgcttctcgcgggcggtgtccatgcactgccagaagcccttgtggatatagctcatcagctgaccctcctcggccagcttctgcagcggcttctgctcaaagacgcaggcgtcgccgtccagatagtcgaaaatctgcggctccagcaccatatagcccgcgttgatgagcgcgccgtcgctggccttcttttcacggaaagaacggacagaattatcctcggcaatatccagaacacccttctgctgctcctgctgaacggcggtcagcgtggcgatcttgccgttctcgcggtggaatgccaccagcttggcaatgtccacatcgcagacgccgtcgccgtaggtcatcatgaaggtctcattgccgatgtagggacgaatgcgtttgatgcgcccgccggtcatcgtgttgaggccggtgtccacaacggtgaccttccacggctcggtgtgatggttgtggacgatcatctcgttctggccgcgggtaaaatcaaacgtaatatcgctggtatgcaggaagtaatccgcgaaccactccttgatcatgtgctgcttgtagcccgcgcagatgacaaagtcgtgaaagccgtagtaggaatattccttcatgatatgccacaggatgggcatgttgccgatttcgatcatcggcttgggcttgtagacgctttcttcgctgatgcgcgtgccaaggccgccggccagaattaccactttcatagtgcgctcctttattgttttgtgagccggtcagtccgtcgacgaccggtttttgtcccgtgcgctctgcctcgtttgggcaattttacacacttattcataatgaagagtataacacacacgctctgtaattgcaacaatttacgcccgtctgcgccgttccaaaaccatcggttcaaagtcaatatttttgtccagagcccacaaaaggccgtcgttcgcacatttttttgcgcttttgcgttccaaattttacatactgtatttccgcaaaaaaatccccgccgccggggtgcggcggggggattttcatggtggagctgtagggaggcggcgccctcggcgacccgggccgtccgtcttactgctgcttaaaataatacactgcgccgacaaggccggcgtcgttctggagggcggcggccctgacctcaaggccctcggcgaaggcgggcatgatgcttttgcgcacctgcgcggccaacgggtcgatcagaagcgcctgctgtgcgctgacgccgccgccgatcaggatcagctgcgggttgaagatgtgtacaaggcccgcaaggccctgggcgatctcgttgatccagccgttgagcacagccagcgtgcgggcgtcgcccgcggcgcctgcctcaaaaatcgcacgcccgtcgggcgcgtccagcccggccttctgggcgctgcggaccagcgccgttgtagcggcgtagcgctcatagcagccgattgccccgcaggtgcaggccacgccgtccagcgcgtgcagacggaaatgccccagctcgccgccaaggccgcgcgccccctccagcagatgtccgccggtcaggatgccgccgccgacgccggtgcccagcgtcacaccgatgacatcggtatagcccttagccgcaccgacccagacctcgcccagcagcatacagttcgcgtcgttggcgacggtgacgggcaggccgaaggcacgctccagcgtacctttaatgtccacgccgatccaccccgggaaattgccgcaggtccccgcgaccacgccgcggcggctgtcgatctggcccgtggcggacacagcgatgccctcaagcctcggcgtgtccgcggtcagaaattcgtggatggccgcctgcacggtatccaggatcggcgttttgtagccgtcaaagctgacgctgcgctcggcgcggcgcagcaccctgccgttctcatcgacgagtcccagcttgaccgccgtgccgccgatgtcaacgcccagataggttttactcat

SEQ ID NO: 155 - DNA, 9140 bp, unidentified
  source 1..9140: mol_type = unassigned DNA
aaaagtatcctgaggggttttcctttgaaagactatattgaagaacgagctattgggatagccaactatatcatcgaccacaacgccacagtgcggcagacagcgaaggcgttcggcatctcgaaaagcacagtacatgcggtagtaacaatatggaacgacatgaaagcaaaatcatatggaaaattgaatagaactgaaacaagggcactctcgggtagatatcagggagtgcttttgctataatgaaatcaggtaaccttgagtattggtgaggggagatgcaaaatgacaggaatatatgattgctttggttatggctctggctatgatgtctcttttgaagaaaggtacaaattgattagaaaatcgggatttgattgtgtaatgttgtggtggagcaatcagtttggcagaggagacggttatcaagaggatgtaagattagccagaagagctggtttatttgtagaaaatatccatgcgcctgtgcatgagcagaataatctgtcactggacaatttgagtggtgaaggcgtatttcaaagttatctacaatgtgtagcggattgctgtgaatatgatataccgaccatggtgatacatttgccaaatgataataatcctttaaatcaaacaggaatcagacggttggcagaacttataaacaaggcagaacaaaagaatattcagattgcttttgagaatttaagtaacattaaaaatttgaaaatagttttaaataaattcacttcaaataatgcaggctattgttatgatagttgtcatcatataaattatgcaccggatgaagatttgttgggagtgtatggaaaccggctgatggcaattcatttacaggataacggcggtagccataatcaacatcaattaccattcgacggcaatattaattgggatacagttatggagaaaattgcctgtacaggataccggggagctacaactttagaaccaatgaattgggattattctcatttagatatttgtcagtttttggaattggcttatgaaagggcaaaaaggcttgattacttgcgaaaataatgtaggtgatgaaaggatggaaacagacggggagtttaatcagatttctgattgattctgagggtttgggagatacgcccaacaagcaaaaatgcattttgtgtgtacaaatgcactgcttgccaagttgtgaatatagaattgattgtaaactggaatttagaaaaaacaaggcagagaagaggatgttgatcataaaaatgtatgcgcattagaattgagacgcttgaaaaggtttagtaacataaaatcttttcaagcgttttctttcacttttacggctttgaatggaatatgatgtagtcaggatcggtgtaatttttgaaaaagtatggtggaaatggacaaaagtccagtattttgggaacgtaatttgatttcaagtggattatgcttagattaaataaaaggtctggtctaatctaagaatccttctcatagtatgggagagaaggacaggcgaggtaagggggtgtagctttcgcttgaaacggacgaaattaaattatcgttttcataatccaaattcagcggaagatactgcagatttcctgtgcaaactcttaatagaagtaaatgccgggaaggtagagagggcaatagagaaaactgcattgtatgcagagagtggggattacatattagaaaatttatcggaaaacaaggaaaaattatttgtggggtaagaggagcaaggtgagagccttgctttttgctttgatatctaaaagaaatgaataatcaacacttaaatgagaaaaaaacacgtttaagtgttgattattttgaaaaaatgcatataataaaaaatagaaaagaagatgaggtagcaattatgttgatacaatttaattttaaaaattttagatcttttagagaagaagtaactttggatttgtctgccactaagatgacagaattttctgaaagagttgtgaccatcggaagtgaaaagatactgccgattgctgctatttatggagcaaacgcaagtggcaagtcaaatatatacagtgcatttgagtatatggctgagtatgtagtggattctttcaagtacggagatgaggaagagaagtttgaggagtatagacctactccgtttttgtttgattccacgtcagcagatgcagagtccagttttgaggtctattttactattccaggagataagaacgagaagacatataattatggattttgcgttgatcaggaaggtgtaacagaggaatggctgaattctaaggctaagacagccagaaagtacagtacagtattttatcgtggaaattctgacagtgaattagatttatcaggcttgccaaagaacagcagggataatataaagattgcgctggaaaagcaggtgttgattgcttctttaggagctaagttaaaaattagcaaatgtaaggcaatcagagactggttcttgataaatgaatttgcagattttggtgatccggttactaactttttcttatctcatagattgccaagaggctttgtggatgataagaacgttcagcagaaggttgtagaatactttgcatcttttgatgaacacattaaggatttcagagtagaaaaggttccgaatgatggcgagtcaaaggaagataaatataagatcaatgcacttcataagatgattgactctgacaagatggcagaaattcctctgggtgcagagtcggcaggaacattgaagatgtttgctctttatccggaattgcaggaagtattagaaaagggaagtgtattttttattgatgaattaaatgcacgattacatccgcttttggtaagaaactttttgcttacattcttgaacccgaatattaatgttaaccatgcgcaacttgtatttacaacgcatgatacctggcaactttcaaatcagttgctgcgtcgtgatgaaatctggtttgttgagaaggatgatcgaggtgtttcaacattatattctcttgcagattttgtggatgaggatggagcacgtattcgtaaggacgaaagctatgagaaaaattatctgattggtaagtatggtgctattccgaccttaaagagtattgatatgtttaagggtgctcaatgtccgggggacattggttcagcaccgaccgaagtggaacggagagattgagcatggcaaaaggggatagaacagggaacagaaagacaagagagcaaagaataacaatcaaagtaccggaattgggatattacttaatcgttacagacacagaagggacagaacgttgcttttttacaggattacatcaatccttgccggaaaaagttagaaacaaacttgtcattaaagtcgtagaaacaaagacaagaagcatgattgataaatgcctggagctaacagcttatgaggcgcaatatcgtattccttggattgtgtttgacagagatcaggtaataggatttgataaaatcatcgctgaagcagagaaaaaagacatacaagtaggatggtcgaatccatgttttgaaatatggatgtatgcctattttggtgcaatgccggcaattcaagattcatggacatgctgctctgagttcgggcgagtatatgagagcaagacgggacagaagtattccaaggcagatgaaaagatgtatggaaaaatttgccgtgtgggaaatgaggtaaaggcaatacggatagcacagcagaagttggaacagtgtgaacgtgaaggtaaaaagaaaccatcagagatgtgtcctgggacgacggtgtataggttggtaggagagattaaggaaaatgcaaatggataacaaaatacgaaaaaagtcagatatagaaggagtagatgaactttatgaacaccttgccgaaggtatcagtagcatgaaatccggtgaaatatatactatcgaagaagcctggcaggaaattgaccaactataatgaaatcaaccacaatccctatcataacccctcagatactttcatacactgtaaaaaagtattctgaggggttttcctttgaaagactatattgaagaacgagctattgggatagcgggctatatcatcgaccacaacgccacagtgcggcagacagcgaaggcgttcggcatctcgaaaagcacagtacataaggacgtgacggagcggctggtgcaggtgaatccgtcgttggcgaaacaggcgcggaaggtgctggatatcaacaagtctgaacgacatatccggggcggactggctaccagagaaaaatatctccatcagcactagatgttcgggcaggcaatagcttctgtacgggaaattatcttgaaatggctgatgacaccttatataatgaatgcatatcacgtattacatttgtgaggggagaatacgatggcaacagattttttgaatgatgcacggagagagatcgaaggacggacagaagacttttacggggaactgaaagccttctatcagggaaatgcaaaagcagagcagaacctgatggaacagacgacacagcccttttggcagagcctttgcttaagtgggaaaagattacagcagcgggacctgacggtggatatggagatgcaggaaccggtgcggccggcggattacgatggcccgaaaaaggacggctatgattacacctgccaccggaccaaagctgtgaagatgagacgtacctattaccgtaaagggaaaaaaatcgcgaccctgaagacaccggagatcgtggaagccaattttttgaaagcggatgtgcagggggatatggcgatctgcccaaactgcggtcatgaaggaaaattgtccagctatatcgatggctgtgatgcctgtggagcaaagtttctggtcagtgatttcgagacgaaggtatccggcttttcgttggaagaggacgcaaggcagaaaagcatttccaactttatcaaagccggagtgacggtaggaatcgtagtggttgcccttgcactgctggcaatctgtgcgggcggcattatgtttttactgctggctttggggagaaatggttataacgcggtcaaagcggcagcggcaatgatgcttggtatcggattcgctccggtgtttttccgttctttgtttttcatggcgatcatattcgtagtaatgattgttgtaatggaggaacatagaaaaccgaaaattcaggacgagtcaaaagtaaaggcactgatcccccaattttccacaggtaatttcctacagaatctggagtaccagctacggatgatccacatggcagataccgcagagcaggtgcgctttttcgcggtctgtgatctgacaggtactgtggagcggtatcagaatgtggtggattgctgtatctgcggcgtacgttttttgaaagcggaagcggtggaggaccggtacaggctgagcgtggaagtgaaaatgcgcctgacgcaggatacgggtagtaaaattcgcaaccgctatgagaaactgcggctggaactggaaggcagacaggagatcgtgacacagcatggcaaggcacttcgggaatataaatgcccgaactgcggtggcagtgtggatatcttaggcggcggagtatgtgactactgtaatgtagcagtggattatcggaatttcggctggatcatcacatcctatacgaatctgggacagccggagaacccctatgccaaaatactggcagcagccctgggcatctacggaattatcctggctttcagcctggtgctcatgatctgttccgaggacggaaaagaaaccctggagatctggcagagcatcggcaggtcatcggaatacctggaagccgtgaagcaggatattgtatatccggatgatgtgctggaaggccttgcggagacggacagtgaggaaagcatatttgcttccgcgaagacctatgcctgcggagacagcgaggcagtaaaagaagcttattacgaagcccttttagagagtggatttatcgagctacagcagtatccggaaggattttctgtatataagatcgaggatccttcagaatatgccgtggatgaagaagaggagatgttctatctggtgatctgtgcagaaaatgcaccggagggaattacagtaactgcgaccttggtggatgaaaattgggacccggtgcaggagtaaaacagaatacgtgaatacgacaagggacccgggcgaaagcttccgggtcctttttagagggaaagtgtttgtagttagcttattgggtgagaggaattctgtggaccaccctgcgatagagcttccacaggagcacagcagggaaactgattgccagatatgctgtggataaaagtccggtagcaccgcctacgattgcaatgattaaaattccaatattcataatgaattcctcaactttctgtcattctgcaaagcattcgatgaagcttttaaaaaacctcacataccgtattatagtaaacagatctccccgggtgaatagttttgccagagccttaacactattttgtcgggttatttacagaatctttgcaacacatttacagaatcttaacgggtggaaacgataccgggagttaggtttgcaatagtagggaatatcaagtataatagaaaaaaattgactgttgctgacaatgacagtttaagaaaatgggaggtagaatatgagtatgacgctggaacaggctaaggagaagcttgcaaagtatggtcaggaacatgttctgaagtattacggggaacttaccgaagaagagaagcgggggattctggatcagatcgaggctacagatatgagcattttggaagcttgtaagcacaaggaggatctggcgaaaaaaggagtgatcactccgcttgctgcaatgcagttagatgagatcgaggcaaacagagagaatttcacggcgaccggtatcgaggcgatccgtcaggggaaggtagcagcggttctgttagcaggcggcatgggtaccagattaggctctgacaatcccaagggaatgtacaatgtgggactgactcatgagctgtatatttttgagtgtctgatcaataatctgctggaagtcgtacatcagtcagatgcatggatccatctgttcgtaatgaccagtgataaaaataacgatgccactatcgcctttttacaggagcatgagtatttcggatacaaggcggagtatgtgcactttttcaagcaggagatggcggcggctaccgattacgagggtaagatttatctggaggagaagggcaagttgtccacctctcccaacggcaacggcggctggttcatttccatgaaaaataacggcatgctggatatcgtacataacgagggaattgaatggctgaatgtatttgccgtggacaacgtcctgcagcgtatcgcggatccctgctttatcggtgctacgatccagagaggctgtgtcgtaggctccaaggtggtccgcaagaatgcgccggatgaaaaagtaggcgttatgtgcttagaggacggcagaccttccatcgtggagtactatgagctgaccgatgaactgatgaacgcgaaggatgagaagggcgaacccgcgtataactacggagttatcctgaattacctcttcaaagtacaggatctggagaagatcatggaagaaaaaatgcccctgcacatcgtagagaaaaagatcccgtatctggatgagaacggagaaccggtgaagccggagactcccaacggctacaaattcgagagcctggtactggatatgatccatcagatggacagctgtctgcccttcgaggtagtcagaagaaaagaattcgcccccatcaagaataaaaccggtgtggattcggtggagagtgcaagagaactgctcgttgagaatggcgttgtgctgtaaacatttcgacagcttttcacaacataaggttattgaggaaacaacagaattacagtaatctgatactgtaagaaacgaagaaataatctcatccggatctgacagatgagagatcgtgcggtcgcagcagtgaacaaatggtattgtccggtatgcggcggataggagagagtatgagaattttggtaacaggtggtgccggattcatcggcagtcataccgtagtggaattacagcaggcaggctatgatgttgttgtattggataatctctgcaatgcaagtgagaaagttatccccagagtagaagccatcaccggcaaaaaggttcctttttataaggcagacattctggatcgtgaagcgctggaggagatctttagtaaggagcagatcgatgcagttattcattttgcaggactgaaggcagtcggcgagtccgtacagaagccctgggaatattacgagaacaatattgcaggtacattgactctggtagatgttatgagaaaacacggtgtgaagagcatcatcttctcttccagcgctaccgtatatggtaatcccgcatttgtccccatcacagaggaatgccccaagggacagtgcaccaacccttacggctggaccaaatccatgctggagcagatcctgaccgatatccagaaggcagatcctgaatggaacgtgatcctgcttcgttacttcaacccgatcggagcacacaagagcggcaccatcggtgagaacccaaatggtatccccaacaacctgatgccttacatcacacaggtggcagttggcaagctgaaagagctgggtgtcttcggtgatgattatgatacccccgacggaaccggcgtgcgtgattacattcacgtagtagacctggcaaagggtcatgtgaaggctctgaagaagatcgaggagaatgcaggactgaagatctacaacctgggaaccggcgtaggctacagcgttctggatattgtgaagaactttgaagcagctaccggtgtgaagattccctatgtgatcaagccccgtcgtgcaggcgatatcgctacctgctattccgatgcttctctggcagagaaggagcttggttggaaagcggagaacggcatcaaggaaatgtgtgaagattcctggagatggcagaagaacaatcccaacggatacgaagaataa

SEQ ID NO: 156 - DNA, 12430 bp, unidentified
  source 1..12430: mol_type = unassigned DNA
atggcaaaacgcgtatttttgatcgtgctggacagctttggcgttggcgcagagccggatgcgccgcagttcggcgatgccggtacaaacacgctggccgctatcgccggtcatcccaatttcaagggagaaaatctggcaaagcttggccttttcaatctggacggtgtgacctgcggtaagccggaggcaacgcccgttgccagctttgcccgcctgcgcgaggcaagtgccggcaaggatacgaccatcggccattgggagatcgcgggtctgctcagcgctgagccgctgcccaccttcccggacggcttcccgcaggaattgcttgatgcattcacggccaaaaccgggtatcaggtcctctgcaacaagccctattccggcaccgatgtcatccgcgactacggcgaggagcatctccggaccggggcgctcatcgtttacacctccgccgacagtgtgttccagatcgctgcgaacgaagcccttgtccctgtggaaaagctctatgagatctgtgccgaggcgcgggagctgctcaccgggaagtacggcgtcggccgtgtcattgcccgaccgtttgtgggggactgcgccgccaactttacccgcacaccgcgccgccatgactacagtctggtgccgccgcgcgatacaatgctggacgctatcctcgctgccggaaagcagaccatcggtgtgggtaagatccacgacatttttgcaggcaagggcattggggaaaccatccgcaccgccggcaacaccgagggacttcaggtgacgctggagctggccgaccgcgattttgagggccttgccttcgtcaacctcgttgactttgacatgctgtatggccaccgccgtgacattgccggctatgccgctgccgctgcggagttcaatgactggctgccgacctttatggtcaaaatgcgccccggcgatgtgcttatggtcaccgctgaccacggctgcgaccccagctacaccaagaccaccgaccacacccgtgagcatgtgccgttccttgtgtatggcgatgagatccgccccggtgtgaacctgcatacacgctacagctttgcgaccatcgccgacacggtctgcaaggcgctgggcgttgcgtactgcccggcgggctgcggcgtctatgatgaaattgcgaagtaacgtgggcgtacttcttctttacctgctggcggcggtgctggtggtttactccctctcgctggtgttcctttccaacttcaacatgggcaaccttatggtctggctgctcaccggctgcgttaccggctacgctgtctttcgcagacccgttaatgcgtggttttctgcaggtatcgggcgcgtggtttttggggtgctggcggtcttggtctgcctttatctggctgttattgcctttgttgctgtcagcgggtatcttcacccgcctacagggaacgagcaggtcgtgatcgtgctgggggcgggcctgcacagggacaagcccagcaagctgctgcaataccgccttgacaaggcctatgcgttcgccgctgcccaccccgacacgctggtcatcaccagcggcgggcagggccgtgatgagtggatccctgagggcgatgccatgcgggactatctgattgcaaagggcttgccgcccgagcgggtcctgtctgagaaccgctccacctccacggaggagaactttgccttttcgcttgcgctgctgcagtcgcggggcttttctcaggcgacccccatcgtctatgtttccaatgaattccactgctaccgcgccgggcagtatgccgcaatggctggctttaccaatgtgtctgagcttgccgctgcaacaccgctgcgcagtgtgctgccctgctatatgcgggaggcactggcgctgctttattactgggtattcaaaacctcatcctccgggccgatgcatgcaatggtcggtctgctggatctgaataagaaattcttttacaaataggaggggactgccatgcagatccgctattacaaagagtacagccgttttctgaaccgatttatggagttcaaggtctacggccacgccggacggcccatcgtgattttcccgtgccagagcggccgcttctttgactgggaggaccgcaacatgtgcaacgccgctgcccgctgggtggatgacggccggctgcagatcttcacagtggacagcatcgaccccgagagttgggacaacaccggccccgagcgcccgcgtatcgagatgcaggagcgctggtacaattatatctgcgaggaatttgtgccccgcctgcttgagatcaaccgtgagcagggcgacgacaacaccggcaagatcctgaccggcggtgccagcatgggcggcggccacgccgtcaacttcttcctgcgccgcccggacatcttcaacggcacgatcgcactcagcggcctgtattcctccggcatgttcttcggtgggtatatggacgatctcgtctaccgcaattccccctgcgattacatgcgcaatttccccacgacccacccttacatgaagctgtttgaaaaggccgataagttcatcatgtgctgcggtcagggtgcctgggagggcgacctgctggcctccacccgagagctgcaggccattctcgagagcaagggcatccatcccatcgttgatatctggggcgaggatgtgtcccacgactggtattggtgggagaagcagtgggtctacttcctgcagatgacgctggatgacaagaagtaaggatttgtatatggatttctggcacgatgcagccgcgcaaaagcgctggctgcgccgttttgcgctgttgatcggcctgctgctggtgccggtgtttgtactggccgtcttcgcccgcccctcggcggatgattatatctacgcggcccgcacccatgcggtcatacagcagtacggctttgacctgccgcggctgctcaaggccgcgtgggacaccaatgtctactactatcagaactggcaggggctgtatgtctccggctttacgctggcgtttcagcctgctatcttcggtaaccggttttacggcgtcacattgctctgtgtgctgctgccgctctttttctgcctgtacgggctggcgcgctgtgtagtgctgcgcttatctgcggcgcaaagacggctgccttgggcgctggcgctgctgctgaccttcgcttttatcgagggaatgcccgccccggtcgaggggctgtactggttcaacggcgcgatgaactacctgccgtatttctcgcttgcggtgctgaacgcaggccttgcctttgcgctctgctttgctgcgcagcttacgctgcggcacagggtgctgtacgcagccgcaggctgcctgtgcagtctggtcatcagcggcggccatcaggtggccgggcttttgaatcttcttttgctgctgcttgcggcagtgctctgcgcacggcggcgtaacttctggcagctgcccgcctttgcggcggcaatccttgggctgctgttcaatgtgctggcccccggcacgcgggtgcgcacagcaggcttttccggtgcaggcttcgccgaggctgttatcaaaagctttatccttgccgcgatggagtggatccgctggctggatgtaccgttgctctgcctgctggcgctgctggcgtttccgctgcttcaccttgcccgcagtgccgctctgccggaccgtgtgttccgctacccgttttttggcgcggcagtcacctttgtgctgatgtggggcatgatcttcctgccgtcctacacaatgggcggcatcggcgcgggtcggcttttgaatgtcgtctggatgacctttgtgctggggctggctgctacagagtttcttctgctcggctggcttgagcgtgtgcgcggcctttccctgcatggcgcagagcagttttgtaaacgccatgcccggcgtctgccgcaggcggctgcctgtatgctggtctgcatggcctgcatcggcagccataccgttaaggaggggcaggacaaccactttgccaccagcttggaggctgcctatgaactggcggacggacaggccgcacgctacgccgcggcactggatgcgcgggaggctgttctgaccgatgccgcccagcaggatgtaatgatccgcccgctgaacggcgaggaacgcccctggctcctgttctacaccgatgtggcgcccgggccggacatgtggggcctgacgccctattttgacaagcagtccgtcacgattgctgagccgaacggatgatttcccctgccttggggcaggcaggctgtcaaaaaattattgtaggggcgagcattgctcgcccgtgcccgtttgtctgtaaaaatttttcccggaaaatgcgttgctgcgctaagttggcgggcgaccaatggtcgcccctacatatgaaataggctaagcatgtgattttttgacacatagccccctgccttgtgcaggggttttgcgtggtgtcaattcctattgacaaagtaggaaactgcggtatactattccggtatactactgtaaaagagggcacacgccatgatctaccttgattataccgccaacaccccggcagacccggccgttttgaacgcctttatcgcggcggagcaacgctacattgccaaccccaactccacccacatcgccgggcagcaggcccgggctgagatggaccgtgtgacgagctctattgcgcagcacctcggcgtgcagccggctgagatcatctacacctccggcgcaagcgaggccaacaaccttgctgtcaaaggcattgcacaggccgcacggcatatcggtaagcacatcatctccaccgagctggagcattcctctgtgggggcgtccttgtccgtcctgcagcagcagggctacgagatcgacctgctgcgcatcggccgtgacggtagggtagaccttgaccagctgcgggagctactgcgcgatgatacgattctggtagcagtctgcaccgtggacagtgaattgggcaccgtgcagcccattcgggaaattgcagagctcgtcaaattgtaccccggctgccgcctgcatgtggacgcaacacaggccgtaggcaaaacggacctctggctggacggtgtggacaccatgagctttacggcccataaattttacggcctcaacggcatcggcgcgctgtataagcggcgcgggctggtgatcacaccgcagatctccggcggggccagcactacgatctaccgcagcggcacgcccacgctcgggctggcggtcagtctggatgcggcgctgaccttggcgttggacgcacaggcggcgcgcactgcgcaggtccgcttgctgcatgaccgccttgtggcagcgctgcggcgctacagccttgtgcgcatcaacagccccgaaactgcagtgccgcacatcatcaatgtcagcgttaccggcatcaaggggacgcggttccagcaggctctcagcgagcagggggtctgtgtttcggtcaaatcggcctgttcctcggacgggatgccgtccaaggccgtgtttgccgtcagccgcgaccgccgcaatgcgctgtccagctggcgcatcagcttaagccacctgacgaccgaggaagaaatcgaaggcttcctgcaggtcttcgatacctgctacaaaaccctgacaaacaaggagaattgaccgttggaacgccaattagaagcatatcaaaaaatcgagcgcagcatcatcaaaaaatttcgcaagcagctgtggacaccctttatcgtggccgtcaagcggtatgagctgattcaggcgggggacaagatcgccgtctgtatttccggcggtaaggattctatggtcatggccaagcttttgcaggagctgcagcgccacagcgaggttccgtttgagctggtctatctcgtcatggaccccggctataacgaaatcaaccgccaaaagatcgagagcaacgccgcactgctgcatattcccatcacggtgtttgaaacaaacatctttgatgtggcaaacaacagcgataaatctccctgctacctttgtgcccggatgcgccgtggccatctgtataaaaaagcgcagcagcttggctgcaacaaaatcgcgctcggccatcatttcaatgatgttatcgagacgaccgtcatgagcatgttctacggctcgcagctgcaggccatgccgcccaagctgcacagcacaaatttcccgggtatgacgctgatccggccgctctactgcatccgcgaggaggacatcatcacatggcggcggtacaatgaccttgaatttatccagtgcgcctgccgctttaccgaggcatgcaccatctgcgacaatgggggcggcggctccaagcggcaggaaatcaaggtcctgctgcgccgcctgatgcgtgacaatccgaatattgagaacagcatcttccgcagcatccacgctgttgcgctggacacgatgcccggctacaagaccgagggagaggagcattcctttctggagcggtttgaccgcatcgaggaggagctgaaaaacgcccgggaatgatttggctgctatacacagggggtacctatgaaacggatcctttgcgcccttgcaatactgctgctggcaggctgcgcgtcacggccggctgatgtgatcggcacacctgcgccgacgacaacgcccgcccagacaccagaaactgccccgacctgccagcccggccaaacaaccgaaaccgcagccagtgaatatacggccatccagctgcagcagcaggatacccgaagcggccagctgctggcgcaggacgggcttgccacagacggctattatacgatgtgcatggacggaaaatggggcctgatgaaaagtaacggcaccgtcctgctgccctgtatctccgaccggccgatcgaacgctgcgccaacggctgtctgcgctggcattttctcagcacctcggccccgatggatgatgcggagcgcagcagctatgagacggcgctcgccgcagaaaatgccggtacactctgcaccggtgagcatgacgggcagagctatacatggacctatgacatcaacaccggccgtgtatgcaaaagcgccggcatgatgggcggtgctgccgaactgaacgatggcgatgccctgtatggggattatctgccctgtgtgcggagtgtgtggacatccggaaacggtgacccggactattatacgacagccgagggcggcggaattgtttttgccaattctgacggagaccttctgaacggcattacctatgcgtccgcaggctgcttttatgaccaacctctggccccggtcaagatcggtgacaaatgggcctaccttgaccggaagggaaatttggcaacggaagccgtgtatgacgcagtctacggcggtctggatttttatgaggattacacgccaaagtatgcctcacccctgctgaatgggtatgctgccatctgccgtgacgggaaatggggtgtgctggacgccgccgggaaggagtacatcccctgcgattatgcaggtgccgcttggaatggccatatcctctggctgcagcgggacggacactggcagagcagaacgctgcccggcgtgccggagcattggcaggatgccaaaatgcgctttcaggttggtccgaaggagctaaaggcaacagacgccttttggcgggtcaccgcagccggaggcctgcggctgcgtgtagggccggacacaagctacgaaaaaatcagccttgtgccggaatacaccgccctgcaggaactgggccgcagcgaggatggttgctggatgctgactctctacggcaggtggcacggctgggtcagcatggatcatcttgaaaaaataacaccatgaaacaacgcaggagccatgccgcccaagcatggctcctgcgctttgcttaccattgccgccggtactggcccggtgttgtgccctccacctttttgaagatgcgcgaaaagtaattggcatcgctcatgccgcattcctgtgcgataacctcaatgtttttatcgctgaatcgcaacaggcgctttgcctgcgtgatgcgcagctgcatcaggtaacctgtgaccgtctgaccgaactgctctttaaaaacgcgggtcaggtagaatttgttgatgtaaaactgctccgccaaggcgtccagcgtgatcttttccccatagtgggcgtcaagatagtccttgatttcctgcagattctgccgttttgcaccttctgcgcgcacggcctcggggtgccagctttcctgcatcagcagggtcagcagggccagcagcttttcgcatatctgcatgtcgcgcacataattgtcggaatcggccagcgtatacagggtttccagcagcgcggcataggcagctgcattctcggcgcggaagcttggctgaccgccgcgctcctcgtattttttgtagatggcccccatgttcgggccgtaaaaatgcacccagcgcagctgccacaggtcctcgcccgtataatggcggtacggcttgcggcagtcaagaaatgcgcagtccccggcgcgcagggcgcgagtggtgccatcatattccaaggtgccgctgccgctctccaccatgaagaacaggtaggaggccagccccttacgggtgctggcatgagggctgcgcgcctgcagccggccaacctcctgtaaatgcacaagattcgaccgtgcaaagggggagggtgtataaataatgcgctgggaatgcaccagcttgccgtcaaataacggtgcttccataactgtaccttccttgttttgtgtgggtgagcaatgcccgccccgacatctttacatctcagcactgcaaacccagtataccaaaaaagtcaatataatgctagtcttttgcaagattcgccctgcaaaaaagaaaaatagtgcggtagaataacaaacatacagagaactacgcgcaaaatcaccgcgcaagatacagatgaaagggaaaccgcattatgaaaaaagcactgatcaccggtgttaccggtcaggacggcagctatctggcagagtttttgcttgagaagggctacgatgtccacggcgttatccgccgctcctccgttgattaccgtgagcgcatcgcccatctggagggtcaccccaacttccacctgcactacggcgatctgagcgattcgatgagcatcctctcggtcgtcagcaccgtgcgccctgatgagatctacaatctggccgcccagagccatgtgcaggtcagcttcgatgtgccggagttcacggccgatgtcgatgccaccggcgtgctgcgcgtgctggaggctgtgcgcctctgcggcctgaaggacacctgccgcatctatcaggcctccacctccgagctgtacggcaaggtcgaggaggtcccccagaacgaaaacaccccgttccatccctacagcccctacgctgtcgccaagcagtacggcttctggatcgtcaaggaataccgcgaggcttacaacatgttctgctgctccggtatcctcttcaaccacgagtctgagcgccgcggcgagactttcgtcacccgcaagatcacgctggctgccgcccgcattgcgcagggcaagcaggacaagctctatctcggcaatctgtccagcctgcgcgactggggctatgccaaggattatgtcgagtgcatgtggctgattttgcagaacaagacccccgaggattttgtgatcgctaccggcgagcagcactccgtgcgcgagttctgcgagctggccttccacaatgtcggcatcgagctggaatttgtgggcgagggcatgaacgaaaagggcatcgacaaggctacgggcaaggttgtcatcgaggtcagccccgatttctaccgtcccaccgatgttgtcaacctgtggggtgaccccagcaaggccaagcgcgagctgggctggaaccccaccaagaccacctttgcagagcttgtcaagatcatggtcgatcatgacatgaagaaggtcgccgtagagcgcgccgaggagcatatcaagaccaatctggctgaatatctcgaaaagggcgttatcaaataatttcatcaaaagcatcaaaagaaggtaacaatcatgatggaaaagaatgctaaaatttatgtcgccggccatcgcggcatggtgggcagcgccatcgtgcgcgagctgcagcgtcagggctacaccaatatcatcacccgcacgcataaggagttggacctctgccgtcaggaggatgtcgagcgcttttttgcagaggaaaagcccgagtatgtctttctggcagccgccaaggtcggcggtatcgttgccaatcaggaggcactggctgactttatgtggtttaatatgacgctggagatgaatgtcatccactccgcatggcagaacggctgcaaaaagctggaattcctcggctcctcctgcatttatccccgtatggcgccccagccgatgaaggaaagctgcctgctgaccagcgagctggaaaagaccaacgaggcctacgccctcgccaaaatcagcggcctgaaatactgcgagttcctgaaccgccagtacggcaccgactatatctcggtcatgcccaccaacctctatggccctaacgacaactatcacccgacccacagccatgtggtcccggcgctgatccgccgcttccatgaggccaaggtcaacggtgtggagagtgttacctgctggggtgacggctctccgctgcgtgagttcctgtatgtggacgatctggccaacctctgcgtgttcttgatgaacaactactccggtaacgagactgtcaacgccggcaccggcaaggagctgaccatcaaggagctgaccgagctggttgccaaggtcgtgggctataccggcgagatcaagtgggacacctccaagcccaacggcacgccccgcaagctgttggatgtctccaaggctacgaatcttggctggacctacaggaccgagctggaggacggcctgcgcctgtcctatgaggacttcctacacaacccgatgcgcgccgagcgctgaaaggaaacgctatgaatatcattctgctgtccggcggctccggcaagcgcctgtggccgctgtcgaacgatatccgttccaagcagttcatcaagatcttcaagaccgatgacggctacgagtcgatggtccagcgcgtctaccgccagatcaaagaggtggacactgatgccagcgtgacgatcgccaccagcaagacgcaggtgtcgtccatccacaaccagcttggcaattcggtcggcgtctgcgttgagccctgccgccgcgataccttcccggcaatcgcactggccacggcctatctgcacgatgtaaagggcgtgggccttgatgaggctgtggtcgtctgcccggtggacccgtatgtcaacaatgactattttgccgcgttaaaggatctctccgatcttgcggaaaagggcagcgccaacctctcgctcatgggcattgagccgacctatcccagcgaaaagtacggctacatcatcccggagagcgccgatgctgtcagcccggtcaagacctttaaggaaaagcccgatgccgccacagcggaaaagtacattgcgcagggtgcgctttggaacggcggcgtatttgcctacaagctgcgttatgtgctggacaaagcacatgagctgatcgactttaccgattatcaggaccttttccgtaaatatgagacgctgaagaagatcagcttcgattatgcggtcgttgagaatgaatcgaagattcaggtcatgcgctttgcaggccagtggaaggatatgggcacctggaacaccctgaccgaagccatgcaggagccgagcatcggcaaggccatgctgaatgagacttgtgagaatgtgcatgttctcaatgaactggatgtacctgtgctttgcatggggctaaagggtgttgttgtctctgccagcccggagggcattctggtctccgataaggagcagtccagctatatcaagccctatgtggacagcatccaccagcagattatgtttgctgaaaagtcgtgggggtccttccgcgtgctggatgtcgaggatgaaagcctgaccatcaagatcacgctgaacgccggtcacggcatgaactaccacagccacgagaaccgcgatgaggtctggaccgttatctcaggcaccggccgcgcgattctggacggcagggcgcagcccgtcaaggcaggggatatcctgacgatgaaagccggctgcaagcacacgattctggccgataccgagctgaaggtgatcgaggtgcagcttggcaaggccatcagcgtggaggataagcagaagtatcccatgccgcaggcttga
